(19) United States
(12) Patent Application Publication
(10) Pub. No.: US 2020/0102368 A1
(43) Pub. Date: Apr. 2, 2020

(54) ALBUMIN VARIANTS

(71) Applicant: Albumedix Ltd, Nottingham (GB)

(72) Inventors: Jan Terje Andersen, Oslo (NO); Bjorn Dalhus, Hagen (NO); Inger Sandlie, Oslo (NO); Jason Cameron, Nottingham (GB); Andrew Plumridge, Derbyshire (GB); Esben Peter Friis, Herlev (DK); Karen Ann Delahay, Nottingham (GB)

(21) Appl. No.: 16/660,618

(22) Filed: Oct. 22, 2019

Related U.S. Application Data
(62) Division of application No. 14/322,547, filed on Jul. 2, 2014, now abandoned.
Application No. 14/322,547 is a division of application No. 13/463,944, filed on May 4, 2012, now Pat. No. 8,822,417.
(60) Provisional application No. 61/614,135, filed on Mar. 22, 2012.
(60) Provisional application No. 61/551,598, filed on Oct. 26, 2011.
(60) Provisional application No. 61/482,830, filed on May 5, 2011.

(30) Foreign Application Priority Data
May 5, 2011 (EP) 11164991.9
Oct. 13, 2011 (EP) 11185064.0
Mar. 16, 2012 (EP) 12160007.6

(51) Int. Cl. C07K 14/765

(52) U.S. Cl. CPC C07K 14/765; C07K 2319/00

(57) ABSTRACT

The invention relates to variants of a parent albumin having altered plasma half-life compared with the parent albumin. The invention also relates to fusion polypeptides and conjugates comprising said variant albumin.

### CROSS-REFERENCE TO RELATED APPLICATIONS

[0001] This application is a division of U.S. application Ser. No. 14/322,547, filed Jul. 2, 2014, which is a division of U.S. application Ser. No. 13/463,944, filed May 4, 2012, which issued as U.S. Pat. No. 8,822,417 on Sep. 2, 2014, which claims priority and the benefit under 35 U.S.C. 119 of European Application Nos. 11164991.9, 11185064.0 and 12160007.6 filed on May 5, 2011, Oct. 13, 2011 and Mar. 16, 2012, respectively, and U.S. Provisional Application Nos. 61/482,830, 61/551,598 and 61/614,135 filed on May 5, 2011, Oct. 26, 2011 and Mar. 22, 2012, respectively, the contents of which are fully incorporated herein by reference.

### REFERENCE TO A SEQUENCE LISTING

[0002] This application contains a Sequence Listing in computer readable form, which is incorporated herein by reference.

### BACKGROUND OF THE INVENTION

### Field of the Invention

[0003] The invention relates to variants of albumin or fragments thereof or fusion polypeptides comprising variant albumin or fragments thereof having a change in binding affinity to FcRn and/or a change in half-life compared to the albumin, fragment thereof or fusion polypeptide comprising albumin or a fragment thereof. The invention allows tailoring of binding affinity and/or half-life of an albumin to the requirements and desires of a user or application.

### Description of the Related Art

[0004] Albumin is a protein naturally found in the blood plasma of mammals where it is the most abundant protein. It has important roles in maintaining the desired osmotic pressure of the blood and also in transport of various substances in the blood stream. Albumins have been characterized from many species including human, pig, mouse, rat, rabbit and goat and they share a high degree of sequence and structural homology.

[0005] Albumin binds in vivo to its receptor, the neonatal Fc receptor (FcRn) “Brambell” and this interaction is known to be important for the plasma half-life of albumin. FcRn is a membrane bound protein, expressed in many cell and tissue types. FcRn has been found to salvage albumin from intracellular degradation (Roopenian D. C. and Akilesh, S. (2007), Nat. Rev. Immunol 7, 715-725.). FcRn is a bifunctional molecule that contributes to maintaining a high level of IgGs and albumin in serum in mammals such as human beings.

[0006] Whilst the FcRn-immunoglobulin (IgG) interaction has been characterized in the prior art, the FcRn-albumin interaction is less well characterized. The major FcRn binding site is localized within DIII (381-585). Andersen et al (2010), Clinical Biochemistry 43, 367-372. Data indicates that IgG and albumin bind non-cooperatively to distinct sites on FcRn (Andersen et al. (2006), Eur. J. Immunol 36, 3044-3051; Chaudhury et al. (2006), Biochemistry 45, 4983-4990.).

[0007] It is known that mouse FcRn binds IgG from mice and humans whereas human FcRn appears to be more discriminating (Ober et al. (2001) Int. Immunol 13, 1551-1559). Andersen et al. (2010) Journal of Biological Chemistry 285(7):4826-36, describes the affinity of human and mouse FcRn for each mouse and human albumin (all possible combinations). No binding of albumin from either species was observed at physiological pH to either receptor. At acidic pH, a 100-fold difference in binding affinity was observed. In all cases, binding of albumin and IgG from either species to both receptors were additive.

[0008] Human serum albumin (HSA) has been well characterized as a polypeptide of 585 amino acids, the sequence of which can be found in Peters, T., Jr. (1996) All about Albumin: Biochemistry, Genetics and Medical, Applications pp 10, Academic Press, Inc., Orlando (ISBN 0-12-552110-3). It has a characteristic binding to its receptor FcRn, where it binds at pH 6.0 but not at pH 7.4.

[0009] The plasma half-life of HSA has been found to be approximately 19 days. A natural variant having lower plasma half-life has been identified (Peach, R. J. and Brennan, S. 0., (1991) Biochim Biophys Acta. 1097:49-54) having the substitution D494N. This substitution generated an N-glycosylation site in this variant, which is not present in the wild-type albumin. It is not known whether the glycosylation or the amino acid change is responsible for the change in plasma half-life.

[0010] Albumin has a long plasma half-life and because of this property it has been suggested for use in drug delivery. Albumin has been conjugated to pharmaceutically beneficial compounds (WO 2000/69902A), and it was found that the conjugate maintained the long plasma half-life of albumin. The resulting plasma half-life of the conjugate was generally considerably longer than the plasma half-life of the beneficial therapeutic compound alone.

[0011] Further, albumin has been genetically fused to therapeutically beneficial peptides (WO 2001/79271 A and WO 2003/59934 A) with the typical result that the fusion has the activity of the therapeutically beneficial peptide and a considerably longer plasma half-life than the plasma half-life of the therapeutically beneficial peptides alone.

[0012] Otagiri et al (2009), Biol. Pharm. Bull. 32(4), 527-534, discloses more than 70 albumin variants, of these 25 of these are found to be mutated in domain III. A natural variant lacking the last 175 amino acids at the carboxy termini has been shown to have reduced half-life (Andersen et al (2010), Clinical Biochemistry 43, 367-372). Iwao et al (2007) studied the half-life of naturally occurring human albumin variants using a mouse model, and found that K541E and K560E had reduced half-life, E501K and E570K had increased half-life and K573E had almost no effect on half-life (Iwao, et. al. (2007) B.B.A. Proteins and Proteomics 1774, 1582-1590).

[0013] Galliano et al (1993) Biochim. Biophys. Acta 1225, 27-32 discloses a natural variant E505K. Minchiotti et al (1990) discloses a natural variant K536E. Minchiotti et al (1987) Biochim. Biophys. Acta 916, 411-418 discloses a natural variant K574N. Takahashi et al (1987) Proc. Natl. Acad. Sci. USA 84, 4413-4417, discloses a natural variant D550G. Carlson et al (1992). Proc. Nat. Acad. Sci. USA 89, 8225-8229, discloses a natural variant D550A.

[0014] WO2011/051489 (PCT/EP2010/066572) discloses a number of point mutations in albumin which modulate the binding of albumin to FcRn, WO2010/092135 discloses a number of point mutations in albumin which increase the number of thiols available for conjugation in the albumin, the disclosure is silent about the affect of the mutations on the binding of the albumin to FcRn. WO2011/103076 discloses albumin variants, each containing a substitution in Domain III of HSA.

[0015] Albumin has the ability to bind a number of ligands and these become associated (associates) with albumin. This property has been utilized to extend the plasma half-life of drugs having the ability to non-covalently bind to albumin. This can also be achieved by binding a pharmaceutical beneficial compound, which has little or no albumin binding properties, to a moiety having albumin binding properties. See review article and reference therein, Kratz (2008) Journal of Controlled Release 132, 171-183.

[0016] Albumin is used in preparations of pharmaceutically beneficial compounds, in which such a preparation maybe for example, but not limited to, a nanoparticle or microparticle of albumin. In these examples the delivery of a pharmaceutically beneficial compound or mixture of compounds may benefit from alteration in the albumin's affinity to its receptor where the beneficial compound has been shown to associate with albumin for the means of delivery.

[0017] It is not clear what determines the plasma half-life of the formed associates (for example but not limited to Levemir®, Kurtzhals P et al. Biochem. J. 1995; 312:725-731), conjugates or fusion polypeptides but it appears to be a result of the combination of the albumin and the selected pharmaceutically beneficial compound/polypeptide. It would be desirable to be able to control the plasma half-life of given albumin conjugates, associates or albumin fusion polypeptides so that a longer or shorter plasma half-life can be achieved than given by the components of the association, conjugation or fusion, in order to be able to design a particular drug according to the particulars of the indication intended to be treated.

[0018] Albumin is known to accumulate and be catabolised in tumours, it has also been shown to accumulate in inflamed joints of rheumatoid arthritis sufferers. See review article and reference therein, Kratz (2008) Journal of Controlled Release 132, 171-183. It is envisaged that HSA variants with increased affinity for FcRn would be advantageous for the delivery of pharmaceutically beneficial compounds.

[0019] It may even be desirable to have variants of albumin that have little or no binding to FcRn in order to provide shorter half-lives or controlled serum pharmacokinetics as described by Kenanova et al (2009) J. Nucl. Med.; 50 (Supplement 2):1582).

[0020] Kenanova et al (2010, Protein Engineering, Design & Selection 23(10): 789-798; WO2010/118169) discloses a docking model comprising a structural model of domain III of HSA (solved at pH 7 to 8) and a structural model of FcRn (solved at pH 6.4). Kenanova et al discloses that positions 464, 505, 510, 531 and 535 in domain III potentially interact with FcRn. The histidines at positions 464, 510 and 535 were identified as being of particular interest by Chaudhury et al., (2006) and these were shown to have a significant reduction in affinity and shorter half-life in mouse by Kenanova (2010). However, the studies of Kenanova et al are limited to domain III of HSA and therefore do not consider HSA in its native intact configuration. Furthermore, the identified positions result in a decrease in affinity for the FcRn receptor.

[0021] International patent application WO2011/051489 (PCT/EP10/066572) discloses a first class of variant albumins having modulated (i.e. increased or decreased) binding affinity to FcRn receptor due to the presence of one or more point mutations in the albumin sequence. International patent application WO2011/124718 (PCT/EP2011/055577) discloses a second class of variant albumins having modulated binding affinity to FcRn receptor, the variants comprise domain III of an albumin with one or more other domains of albumin and optionally include one or more point mutations.

[0022] The present invention further variants having modulated binding affinity to the FcRn receptor and, through provision of a range of molecules, allows binding affinity (and therefore) half-life to be tailored according to requirements. Such tailoring may range from a large increase in binding affinity to FcRn and/or half-life to a small increase in binding affinity to FcRn and/or half-life, a small decrease in binding affinity to FcRn and/or half-life to a large decrease in binding affinity to FcRn and/or half-life. The albumin moiety or moieties may therefore be used to tailor the binding affinity to FcRn and/or half-life of fusion polypeptides, conjugates, associates, nanoparticles and compositions comprising the albumin moiety.

### SUMMARY OF THE INVENTION

[0023] The invention provides a method of identifying and/or designing variants of albumin which have improved properties compared to a parent albumin. WO2011/051489 (PCT/EP2010/066572) discloses a number of point mutations in albumin which modulate the binding of albumin to FcRn. The point mutations were used to prepare a docking model comprising HSA and FcRn. The docking model was used to identify regions of albumin which interact with FcRn during binding and therefore whose mutation will alter binding affinity between albumin and FcRn, relative to the binding affinity between wild-type HSA and FcRn.

[0024] The invention provides variants of an albumin with improved properties compared to its parent or reference. In particular the invention provides variants of an albumin having altered binding affinity to FcRn and/or an altered plasma half-life compared to its parent or reference.

[0025] Therefore the invention relates to isolated variants of albumin or fragments thereof, or fusion polypeptides comprising variant albumin or fragments thereof, of a parent or reference albumin, comprising an alteration at one or more (several) positions corresponding to positions in an albumin equivalent to positions in SEQ ID NO: 2 selected from: (a) 492 to 538; (b) 505, 531, 524, 472, 108, 190, 197 and 425; (c) 186 to 201; (d) 457 to 472; (e) 414 to 426; (f) 104 to 120; (g) 75 to 91; (h) 144 to 150; (i) 30 to 41, (j) 550 to 585 and (k) 276, 410 and 414 with one or more (several) of A, C, D, E, F, G, H, I, K, L, M, N, P, Q, R, S, T, V, W, Y and/or a stop codon at a position from 497 to 585;

[0026] wherein, it is preferred that, when the polypeptide comprises one or more (several) alterations selected from (i) the group consisting of positions 417, 464, 492, 493, 494, 495, 496, 499, 500, 501, 503, 504, 505, 506, 510, 535, 536, 537, 538, 540, 550, 573, 574, 575, 577, 578, 579, 580, 581, 582 and 584, and/or (ii) the group consisting of positions 34, 38, 40, 75, 76, 80, 82, 83, 86, 90, 91, 104, 113, 115, 116, 200, 461, 471, 496, 498, 501, 503, 504, 505, 506, 512, 514, 538, 550, 558, 559, 560, 562, 564, 565, 567, 573, 574, 577, 578, 579, 580, 581, 582, 584, 585 (particularly a substitution of one or more (several) of positions 34, 38, 40, 76, 80, 82, 83, 86, 104, 113, 115, 116, 471, 496, 498, 501, 503, 504, 505, 506, 512, 538, 550, 560, 562, 564, 565, 573, 574, 577, 578, 579, 580, 581, 582, 584, 585 from the native residue (e.g. non-Cys residue) to Cys and/or a deletion of or substitution of one or more (several) of positions 91, 200, 461, 514, 558, 559, 567 from Cys, to a non-Cys residue), and/or (iii) the group consisting of positions 63, 82, 84, 87, 90, 106, 114, 119, 146, 464, 201, 494, 501, 503, 505, 510, 513, 518, 525, 529, 533, 535, 536, 537, 550, 550, 557, 560, 563, 565, 570, 573, 574, 574, 584 (particularly one or more of (several) D63N, E82K, E84K, D87N, L90P, K106E, R114G, E119K, V146E, H464A, H464N, C201F, D494N, E501K, E503K, E505K, H510A, I513N, D518N, K525E, E529K, V533M, H535A, K536E, I537N, D550G, D550A, V557M, K560E, D563N, E565K, E570K, K573E, K574N, K574E, K584E); the polypeptide also comprises one or more (several) alterations at a position selected from group consisting of positions 30, 31, 32, 33, 34, 35, 36, 37, 38, 39, 40, 41, 75, 76, 77, 78, 79, 80, 81, 82, 83, 84, 85, 86, 87, 88, 89, 90, 91, 104, 105, 106, 107, 108, 109, 110, 111, 112, 113, 114, 115, 116, 117, 118, 119, 120, 144, 145, 146, 147, 148, 149, 150, 186, 187, 188, 189, 190, 191, 192, 193, 194, 195, 196, 197, 198, 199, 200, 201, 276, 410, 411, 414, 415, 416, 418, 419, 420, 421, 422, 423, 424, 425, 426, 457, 458, 459, 460, 461, 462, 463, 465, 466, 467, 468, 469, 470, 471, 472, 497, 498, 502, 507, 508, 509, 511, 512, 513, 514, 515, 516, 517, 518, 519, 520, 521, 522, 523, 524, 525, 526, 527, 528, 529, 530, 531, 532, 533, 534, 551, 552, 553, 554, 555, 556, 557, 558, 559, 560, 561, 562, 563, 564, 565, 567, 568, 569, 570, 571, 572, 576, 583, 585 and/or a stop codon inserted or substituted at a position selected from 497 to 585.

[0027] The invention also comprises introduction of a stop codon at a position from residue 497 to 585, i.e. any of positions 497, 498, 499, 500, 501, 502, 503, 504, 505, 506, 507, 508, 509, 510, 511, 512, 513, 514, 515, 516, 517, 518, 519, 520, 521, 522, 523, 524, 525, 526, 527, 528, 529, 530, 531, 532, 533, 534, 535, 536, 537, 538, 539, 540, 541, 542, 543, 544, 545, 546, 547, 548, 549, 550, 551, 552, 553, 554, 555, 556, 557, 558, 559, 560, 561, 562, 563, 564, 565, 566, 567, 568, 569, 570, 571, 572, 573, 574, 575, 576, 577, 578, 579, 580, 581, 582, 583, 584, 585 (or equivalent position, relative to SEQ ID NO: 2). Introduction of a stop codon may be instead of or together with the one or more (several) alterations mentioned herein.

[0028] The invention provides an albumin variant or fragment thereof having altered binding affinity to FcRn compared with a parent or reference albumin, comprising an alteration (such as a substitution, deletion or insertion) at:
[0029] (a) one or more (several) positions corresponding to the following positions of SEQ ID No: 2: any of 30, 31, 32, 33, 35, 36, 37, 39, 41, 77, 78, 79, 81, 84, 85, 87, 88, 89, 105, 106, 107, 108, 109, 110, 111, 112, 117, 118, 120, 144, 145, 146, 147, 148, 149, 150, 186, 187, 188, 189, 190, 191, 192, 193, 194, 195, 196, 197; and/or
[0030] (b) one or more (several) positions corresponding to the following positions of SEQ ID No: 2: any of 189, 190, 191, 192, 193, 194, 195, 196, 197, 198, 199, 276; and/or
[0031] (c) one or more (several) positions corresponding to the following positions of SEQ ID No: 2: 410, 411, 414, 415, 416, 418, 419, 420, 421, 422, 423, 424, 425, 426, 457, 458, 459, 460, 462, 463, 465, 466, 467, 468, 469, 470, 472, 497, 498, 502, 507, 508, 509, 511, 515, 516, 517, 518, 519, 520, 521, 522, 523, 524, 525, 526, 527, 528, 529, 530, 531, 532, 534, 551, 552, 553, 554, 555, 556, 557, 561, 566, 568, 569, 570, 571, 572, 576, 583
   wherein the altered binding affinity of the variant or fragment thereof is relative to the binding affinity of a reference such as a parent albumin or fragment which does not comprise the alteration.

[0032] The positions described in (a) (above) may be in a first Domain (e.g. Domain I) of a polypeptide such as an albumin, e.g. HSA. The positions described in (b) (above) may be in a second Domain (e.g. Domain II) of a polypeptide such as an albumin, e.g. HSA. The positions described in (c) (above) may be in a third Domain (e.g. Domain IIII) of a polypeptide such as an albumin, e.g. HSA.

[0033] The albumin variant or fragment thereof may further comprise an alteration (such as a substitution or insertion) at one more (several) positions corresponding to the following positions of SEQ ID No: 2:

[0034] (i) any of 417, 464, 492, 493, 494, 495, 496, 499, 500, 501, 503, 504, 505, 506, 510, 535, 536, 537, 538, 540, 550, 573, 574, 575, 577, 578, 579, 580, 581, 582, 584,

[0035] (ii) any of 34, 38, 40, 75, 76, 80, 82, 83, 86, 90, 91, 104, 113, 115, 116, 200, 461, 471, 496, 498, 501, 503, 504, 505, 506, 512, 514, 538, 550, 558, 559, 560, 562, 564, 565, 567, 573, 574, 577, 578, 579, 580, 581, 582, 584, 585 (particularly a substitution of one or more (several) of positions 34, 38, 40, 76, 80, 82, 83, 86, 104, 113, 115, 116, 471, 496, 498, 501, 503, 504, 505, 506, 512, 538, 550, 560, 562, 564, 565, 573, 574, 577, 578, 579, 580, 581, 582, 584, 585 from the native residue (e.g. non-Cys residue) to Cys and/or a deletion of or substitution of one or more (several) of positions 91, 200, 461, 514, 558, 559, 567 from Cys, to a non-Cys residue), and/or (iii) any of 63, 82, 84, 87, 90, 106, 114, 119, 146, 464, 201, 494, 501, 503, 505, 510, 513, 518, 525, 529, 533, 535, 536, 537, 550, 550, 557, 560, 563, 565, 570, 573, 574, 574, 584 (particularly one or more of (several) D63N, E82K, E84K, D87N, L90P, K106E, R114G, E119K, V146E, H464A, H464N, C201F, D494N, E501K, E503K, E505K, H510A, I513N, D518N, K525E, E529K, V533M, H535A, K536E, I537N, D550G, D550A, V557M, K560E, D563N, E565K, E570K, K573E, K574N, K574E, K584E).

[0036] It is preferred that the parent albumin and/or the variant albumin comprises or consists of:

[0037] (a) a polypeptide having at least 60% sequence identity to the mature polypeptide of SEQ ID NO: 2;

[0038] (b) a polypeptide encoded by a polynucleotide that hybridizes under low stringency conditions with (i) the mature polypeptide coding sequence of SEQ ID NO: 1, or (ii) the full-length complement of (i);

[0039] c) a polypeptide encoded by a polynucleotide having at least 60% identity to the mature polypeptide coding sequence of SEQ ID NO: 1; and/or

[0040] (d) a fragment of the mature polypeptide of SEQ ID NO: 2.

[0041] The alteration at one or more position may independently be selected among substitutions, insertions and deletions, where substitutions are preferred.

[0042] The invention also relates to isolated polynucleotides encoding the variants; nucleic acid constructs, vectors, and host cells comprising the polynucleotides; and methods of producing the variants.

[0043] The invention also relates to conjugates or associates comprising the variant albumin or fragment thereof according to the invention and a beneficial therapeutic moiety or to a fusion polypeptide comprising a variant albumin or fragment thereof of the invention and a fusion partner polypeptide.

[0044] The invention further relates to compositions comprising the variant albumin, fragment thereof, fusion polypeptide comprising variant albumin or fragment thereof or conjugates comprising the variant albumin or fragment thereof, according to the invention or associates comprising the variant albumin or fragment thereof, according to the invention. The compositions are preferably pharmaceutical compositions.

[0045] The invention further relates to a pharmaceutical composition comprising a variant albumin, fragment thereof, fusion polypeptide comprising variant albumin or fragment thereof or conjugates comprising the variant albumin or fragment thereof, or associates comprising the variant albumin or fragment thereof, wherein said variant albumin, fragment thereof, fusion polypeptide comprising variant albumin or fragment thereof or conjugates comprising the variant albumin or fragment or associates of variant albumin or fragment thereof has altered binding affinity to FcRn and/or an altered plasma half-life compared to the corresponding binding affinity and/or plasma half-life of the HSA or fragment thereof, fusion polypeptide comprising HSA or fragment thereof or conjugates or associates of HSA or, fragment thereof, comprising HSA or fragment thereof.

### BRIEF DESCRIPTION OF THE FIGURES

[0046] The patent or application file contains at least one drawing executed in color. Copies of this patent or patent application publication with color drawing(s) will be provided by the Office upon request and payment of the necessary fee.

[0047] FIG. 1: Multiple alignment of amino acid sequences of (i) full length mature HSA (Hu_1_2_3) (SEQ ID NO:2), (ii) an albumin variant comprising domain I and domain III of HSA (Hu_1_3) (SEQ ID NO: 24), (iii) an albumin variant comprising domain II and domain III of HSA (Hu_2_3) (SEQ ID NO: 25), (iv) full-length Macaca mulatta albumin (Mac_mul) (SEQ ID NO: 6), (v) full-length Rattus norvegicus albumin (Rat) (SEQ ID NO: 10) and (vi) full-length Mus musculus albumin (Mouse) (SEQ ID NO: 9). Positions 500, 550 and 573 (relative to full length HSA) are indicated by arrows. In FIG. 4, Domains I, II and III are referred to as 1, 2 and 3 (respectively).

[0048] FIG. 2: Multiple alignment of amino acid sequence of mature albumin from human (SEQ ID NO: 2), sheep (SEQ ID NO: 16), mouse (SEQ ID NO: 9), rabbit (SEQ ID NO: 14) and goat (SEQ ID NO: 15) and immature albumins from chimpanzee (“Chimp”) (SEQ ID NO: 5), macaque (SEQ ID NO: 6), hamster (SEQ ID NO: 7), guinea pig (SEQ ID NO: 8), rat (SEQ ID NO: 10), cow (SEQ ID NO: 11), horse (SEQ ID NO: 12), donkey (SEQ ID NO: 13), dog (SEQ ID NO: 17), chicken (SEQ ID NO: 18), and pig (SEQ ID NO: 19). The Start and End amino acids of domains 1, 2 and 3 (as defined by Dockal et al (The Journal of Biological Chemistry, 1999, Vol. 274(41): 29303-29310)) are indicated with respect to mature human albumin.

[0049] FIG. 3: Conserved groups of amino acids based on their properties.

[0050] FIG. 4: Domain architecture of HSA and shFcRn binding properties of HSA hybrid molecules. (A) Overall structure of shFcRn showing the location of the pH-dependent flexible loop (orange ribbon immediately below ‘His 166’ label)) and His-166 relative to the IgG binding site (red residues in ball-and-stick (ball and stick residues below ‘α2’ label and to left of ‘Glu115, Glu116’ and ‘IgG’ labels) (23). (B) The crystal structure of full-length HSA consists of three α-helical domains; DI (pink), DII (orange) and DIII (cyan/blue) (19). The DIII is split into sub-domains DIIIa (cyan) and DIIIb (blue). (C) Domain organization of constructed hybrid HSA molecules (DI-DII, DI-DIII, DII-DIII, DIII; the domains are shaded in the same scheme as FIGS. 4A and 4B). (D) SDS-PAGE gel migration of the HSA domain variants. (E) SPR sensorgrams of WT HSA and domain combinations injected over immobilized shFcRn at pH 6.0. (F) ELISA showing pH dependent binding of WT HSA, HSA DIIIa and HSA Bartin to shFcRn at pH 7.4 and pH 6.0.

[0051] FIG. 5: The structural implications of HSA Casebrook on shFcRn binding. (A) Close-up view of the interaction network around Asp-494 in HSA. Asp-494 is located in the loop connecting sub-domain DIIIa (cyan) and DIIIb (blue). Asp-494 forms an ionic interaction with Arg-472 and a hydrogen bond interaction with Gln417, which both are located in sub-domain DIIIa. Asp-494 also forms a hydrogen bond with Thr-496, thus stabilizing the loop connecting DIIIa and DIIIb. (B) SDS-PAGE gel migration of the mutants D494N, D494A, D494Q, E495Q, E495A, T496A and D494N/T496A. SPR sensorgrams showing binding of shFcRn to WT HSA and (C) recombinantly produced Casebrook (D494N), D494A and D494Q. (D) E495Q and E495A and (E) T496A and D494N/T496A at pH 6.0. (F) SPR sensorgrams of shFcRn binding to WT HSA and Casebrook isolated from a heterozygote patient. (G) Competitive binding of WT HSA and Casebrook to shFcRn at pH 6.0. The receptor was injected in the presence of titrated amounts of WT or Casebrook HSA over immobilized HSA. (H) SPR sensorgrams showing binding of shFcRn to WT HSA and Q417A at pH 6.0.

[0052] FIG. 6: Conserved histidines are fundamental for binding to shFcRn. (A) Location of selected residues in DIII of HSA. Residues in the loop connecting the sub-domains DIIIa and DIIIb selected for mutagenesis (Asp-494, Glu-495, Lys-500 and Glu-501) as well as additional residues close to the connecting loop such as the conserved histidines (His-464, His-510 and His-536) and Lys-536 and Pro-537 are displayed as ball-and-stick (maroon). The non-conserved His-440 is distally localized. The last C-terminal α-helix is highlighted in yellow (labeled ‘C-terminal α-helix’). SPR sensorgrams of shFcRn binding to WT HSA and (B) P499A, K500A and E501A, and (C) H440Q, H464Q, H510Q and H535Q as well as (C) K536A, P537A and K538A at acidic pH (6.0).

[0053] FIG. 7: His-166 stabilizes a flexible loop in a pH-dependent manner. Close up view of the FcRn HC loop area at different pH conditions. (A) At low pH (4.2), the positively charged His-166 forms charge-stabilized hydrogen bond interactions with Glu-54 and Tyr-60 within the surface exposed loop in shFcRn (23). (B) At high pH (8.2), the uncharged His-166 loosens the interactions with Glu-54 and Tyr-60, and the loop between residues Trp-51 and Tyr-60 becomes flexible and structurally disordered (represented by the dashed line) (8). (C) Binding of shFcRn WT and mutants (E54Q, Q56A and H166A) to titrated amount of HSA coated in ELISA wells at pH 6.0.

[0054] FIG. 8: A proposed shFcRn-HSA docking model.

[0055] (A) An overview of the docked molecules in two orientations showing the FcRn HC (green, labeled ‘FcRnα1’, ‘FcRnα2’ and ‘FcRnα3’), β2m (gray) and the three HSA α-helical domains DI (pink), DII (orange) and DIII (cyan/blue). The DIII sub-domain is split into DIIIa (cyan) and DIIIb (blue).

[0056] (B) Close-up view of the interaction interface between shFcRn (green cartoon) and HSA (blue surface shown by space filling diagram (in greyscale: darker grey)) in the docking model. The C-terminal end of HSA (dark blue (in greyscale: darker grey)) and the loop corresponding to residues 490-510 between sub-domains DIIIa and DIIIb form a crevice on the HSA surface into which the pH-dependent and flexible loop in shFcRn (residues 51-59) might bind. His-166 of shFcRn may form strong, charge-stabilized interactions with HSA residues Glu-54 and Glu-505. HSA Glu-505 could further interact with shFcRn Arg-162. Possible salt-bridges are formed between Lys-150 and Glu-151 of shFcRn with Glu-501 and Lys-500 of HSA. A cleft on the HSA surface is formed between the loop connecting DIIIa and DIIIb and the α-helix encompassing residues 520-535. His-161 of shFcRn may interact with Glu-531 of HSA at low pH, and the complex could be further reinforced by the salt bridge between shFcRn Glu-168 and HSA Lys-524.

[0057] (C) Interaction interface between shFcRn (green surface (space filling diagram at bottom left of figure) and HSA (pink, blue and cyan cartoon (ribbon diagram)) in the docking model. A β-hairpin loop in shFcRn is wedged in-between domains DI (pink, including labels Lys190, Asp108 and Arg197) and DIIIa (cyan, including labels Glu425 and His464) in HSA. The shFcRn Asp110 could be a partner to either Lys190 or Arg197 of HSA following some structural rearrangements in this interface. The conserved His464 is located in the DIIIa α-helix contacting the β-hairpin loop.

[0058] FIG. 9: Representation of shFcRn-HSA docking model. (A-B) Two orientations of the complex are shown. Albumin is shown by a space-filling diagram, FcRn is shown as a ribbon diagram. The core binding interface of HSA is highlighted in pink (in grey-scale this is seen as the darkest (almost black) region; DI (CBI)), while the area distally localized from the interface is shown as DII (orange) and DIII is split into sub-domains DIIIa (cyan) and DIIIb (blue).

[0059] FIG. 10: Binding of shFcRn-GST to HSA Casebrook mutations series (100-0.045 μg/ml) at pH 6.0 and pH 7.4. The ELISA values represent the mean of duplicates.

[0060] FIG. 11: Binding of Casebrook HSA variant isolated from a heterozygous individual and WT HSA (200-1.625 μg/ml) to shFcRn-GST at pH6.0.

[0061] FIG. 12: CD spectra of WT HSA and Casebrook variants at pH 6.0. 5 μM of each variant was evaluated and the spectra shown represent the average of 5 runs.

[0062] FIG. 13: Reducing SDS-PAGE analysis of histidine variants of HSA. Lane 1, SeeBlue® Plus2 (6 μl) and 1 μg per lane of each (2) H440Q, (3) H464Q, (4) H510Q and (5) H535Q.

[0063] FIG. 14: Binding of truncated WT HSA and HSA variant 568 stop (truncated variant that lacks the last 17 amino acids). Binding of C-terminal truncated HSA variant HSA to shFcRn. 10 μM of each was injected over immobilised shFcRn (2000 RU) at pH 6.0.

[0064] FIG. 15: Binding of shFcRn-GST to WT HSA and HSA E168A (200-0.045 μg/ml) at pH 6.0 and pH 7.4. The ELISA values represent the mean of duplicates.

[0065] FIG. 16: A proposed shFcRn-HSA docking model showing, in two orientations, the simultaneous binding of the two ligands (IgG and HSA) to FcRn.

[0066] FIG. 17: Comparison of the fatty acid bound and the free state of HSA showing no substantial rearrangements within sub-domain DIII of HSA upon binding, but a considerable shift in orientation of HSA DI relative to HSA DIII. Myr: myristate; β2m: β2-microglobulin

[0067] FIG. 18: is an extract of the alpha carbons from the PDB file of HSA (SEQ ID No. 2) from the docking model of HSA and FcRn described in Example 1.

[0068] FIG. 19: is an extract of the alpha carbons from the PDB file of FcRn (SEQ ID No. of FcRn) from the docking model of HSA and FcRn described in Example 1.

[0069] FIG. 20: Binding of C-terminal truncated HSA variants to shFcRn. 10 μM of each variant was injected over immobilized shFcRn-GST (2000 RU) at pH 6.0.

[0070] FIG. 21: Competitive binding of C-terminal truncated HSA variants. Competitive binding was measure by injecting shFcRn-GST (100 nM) alone or together with serial dilutions of HSA variants over immobilized HSA (˜2200 RU) at pH 6.0 FIG. 22: Point mutations in the C-terminal end of HSA modulate binding to shFcRn. 10 μM of HSA WT and HSA (A) HSA Q580A, (B) HSA K574A and (C) HSA K573P/Q580A were injected over immobilized shFcRn-GST (˜2000 RU) at pH 6.0.

[0071] FIG. 23: shFcRn binding of WT HSA, HSA K573P and HSA N111Q/K573P at pH5.5, samples were injected over immobilized shFcRn-HIS (˜1500-2500 RU) at pH 5.5.

[0072] FIG. 24: A proposed shFcRn-HSA docking model, showing the spatial relationship between shFcRn (space filling diagram) and HSA (ribbon diagram) DI, DII and DIII including loops of HSA comprising positions 78-88 and 108-112.

### DETAILED DESCRIPTION OF THE INVENTION

[0073] The invention relates to isolated variants of albumin or fragments thereof, or fusion polypeptides comprising variant albumin or fragments thereof, of a parent or reference albumin, comprising an alteration at one or more (several) positions which affect and/or are involved in the interaction between albumin and FcRn, preferably an alteration at one or more (several) positions corresponding to positions 30 to 41, 75 to 91, 104 to 120, 144 to 150, 186 to 201, 414 to 426, 457 to 472, 492 to 538, 550 to 585, 276, 410, and/or 411 of the mature polypeptide of SEQ ID NO: 2, wherein, it is preferred that, when the variant, fragment or fusion thereof comprises one or more (several) substitutions at positions selected from (i) the group consisting of positions 417, 464, 492, 493, 494, 495, 496, 499, 500, 501, 503, 504, 505, 506, 510, 535, 536, 537, 538, 540, 550, 573, 574, 575, 577, 578, 579, 580, 581, 582 and 584 and/or (ii) the group consisting of positions 34, 38, 40, 75, 76, 80, 82, 83, 86, 90, 91, 104, 113, 115, 116, 200, 461, 471, 496, 498, 501, 503, 504, 505, 506, 512, 514, 538, 550, 558, 559, 560, 562, 564, 565, 567, 573, 574, 577, 578, 579, 580, 581, 582, 584, 585 (particularly a substitution of one or more (several) of positions 34, 38, 40, 76, 80, 82, 83, 86, 104, 113, 115, 116, 471, 496, 498, 501, 503, 504, 505, 506, 512, 538, 550, 560, 562, 564, 565, 573, 574, 577, 578, 579, 580, 581, 582, 584, 585 from the native residue (e.g. non-Cys residue) to Cys and/or a deletion of or substitution of one or more (several) of positions 91, 200, 461, 514, 558, 559, 567 from Cys, to a non-Cys residue) the variant, fragment or fusion thereof also comprises one or more (several) alterations at a position selected from group consisting of 30, 31, 32, 33, 34, 35, 36, 37, 38, 39, 40, 41, 75, 76, 77, 78, 79, 80, 81, 82, 83, 84, 85, 86, 87, 88, 89, 90, 91, 104, 105, 106, 107, 108, 109, 110, 111, 112, 113, 114, 115, 116, 117, 118, 119, 120, 144, 145, 146, 147, 148, 149, 150, 186, 187, 188, 189, 190, 191, 192, 193, 194, 195, 196, 197, 198, 199, 200, 201, 276, 410, 411, 414, 415, 416, 418, 419, 420, 421, 422, 423, 424, 425, 426, 457, 458, 459, 460, 461, 462, 463, 465, 466, 467, 468, 469, 470, 471, 472, 497, 498, 502, 507, 508, 509, 511, 512, 513, 514, 515, 516, 517, 518, 519, 520, 521, 522, 523, 524, 525, 526, 527, 528, 529, 530, 531, 532, 533, 534, 551, 552, 553, 554, 555, 556, 557, 558, 559, 560, 561, 562, 563, 564, 565, 567, 568, 569, 570, 571, 572, 576, 583, 585.

[0074] Preferred alterations include those made at positions equivalent to 534, 505, 111, 527, 510 and/or 108 (positions are with reference to SEQ ID No: 2). More preferred are substitutions K534V, E505Q, N111D, T527M, H510D and D108A or such substitutions at positions equivalent thereto. Substitutions K534I, K534L, D108E and N111E, or such substitutions at positions equivalent thereto, are also preferred because they are highly conserved substitutions of K534V, D108A and N111D. Alterations at positions equivalent to a loop comprising positions 105 to 120 (with reference to SEQ ID No: 2) are preferred, more preferred are positions equivalent to positions 106 to 115 and even more preferred positions equivalent to 108, 109, 110, 111 and 112. The skilled person can identify positions equivalent to those of SEQ ID No: 2 as described herein.

[0075] The invention provides an albumin variant or fragment thereof having altered binding affinity to FcRn compared with a parent or reference albumin, comprising an alteration (such as a substitution, deletion or insertion) at:
[0076] (a) one or more (several) positions corresponding to the following positions of SEQ ID No: 2: any of 30, 31, 32, 33, 35, 36, 37, 39, 41, 77, 78, 79, 81, 84, 85, 87, 88, 89, 105, 106, 107, 108, 109, 110, 111, 112, 117, 118, 120, 144, 145, 146, 147, 148, 149, 150, 186, 187, 188, 189, 190, 191, 192, 193, 194, 195, 196, 197; and/or
[0077] (b) one or more (several) positions corresponding to the following positions of SEQ ID No: 2: any of 189, 190, 191, 192, 193, 194, 195, 196, 197, 198, 199, 276; and/or
[0078] (c) one or more (several) positions corresponding to the following positions of SEQ ID No: 2: 410, 411, 414, 415, 416, 418, 419, 420, 421, 422, 423, 424, 425, 426, 457, 458, 459, 460, 462, 463, 465, 466, 467, 468, 469, 470, 472, 497, 498, 502, 507, 508, 509, 511, 515, 516, 517, 518, 519, 520, 521, 522, 523, 524, 525, 526, 527, 528, 529, 530, 531, 532, 534, 551, 552, 553, 554, 555, 556, 557, 561, 566, 568, 569, 570, 571, 572, 576, 583
   wherein the altered binding affinity of the variant or fragment thereof is relative to the binding affinity of a reference such as a parent albumin or fragment which does not comprise the alteration.

[0079] The positions described in (a) (above) may be in a first Domain (e.g. Domain I) of a polypeptide such as an albumin, e.g. HSA. The positions described in (b) (above) may be in a second Domain (e.g. Domain II) of a polypeptide such as an albumin, e.g. HSA. The positions described in (c) (above) may be in a third Domain (e.g. Domain IIII) of a polypeptide such as an albumin, e.g. HSA.

[0080] The albumin variant or fragment thereof may further comprise an alteration (such as a substitution or insertion) at one more (several) positions corresponding to the following positions of SEQ ID No: 2:

(i) any of 417, 464, 492, 493, 494, 495, 496, 499, 500, 501, 503, 504, 505, 506, 510, 535, 536, 537, 538, 540, 550, 573, 574, 575, 577, 578, 579, 580, 581, 582, 584,
(ii) any of 34, 38, 40, 75, 76, 80, 82, 83, 86, 90, 91, 104, 113, 115, 116, 200, 461, 471, 496, 498, 501, 503, 504, 505, 506, 512, 514, 538, 550, 558, 559, 560, 562, 564, 565, 567, 573, 574, 577, 578, 579, 580, 581, 582, 584, 585 (particularly a substitution of one or more (several) of positions 34, 38, 40, 76, 80, 82, 83, 86, 104, 113, 115, 116, 471, 496, 498, 501, 503, 504, 505, 506, 512, 538, 550, 560, 562, 564, 565, 573, 574, 577, 578, 579, 580, 581, 582, 584, 585 from the native residue (e.g. non-Cys residue) to Cys and/or a deletion of or substitution of one or more (several) of positions 91, 200, 461, 514, 558, 559, 567 from Cys, to a non-Cys residue), and/or
(iii) any of 63, 82, 84, 87, 90, 106, 114, 119, 146, 464, 201, 494, 501, 503, 505, 510, 513, 518, 525, 529, 533, 535, 536, 537, 550, 550, 557, 560, 563, 565, 570, 573, 574, 574, 584 (particularly one or more of (several) D63N, E82K, E84K, D87N, L90P, K106E, R114G, E119K, V146E, H464A, H464N, C201F, D494N, E501K, E503K, E505K, H510A, I513N, D518N, K525E, E529K, V533M, H535A, K536E, I537N, D550G, D550A, V557M, K560E, D563N, E565K, E570K, K573E, K574N, K574E, K584E).

[0081] It is preferred that the parent albumin and/or the variant albumin comprises or consists of:

[0082] (a) a polypeptide having at least 60% sequence identity to the mature polypeptide of SEQ ID NO: 2;

[0083] (b) a polypeptide encoded by a polynucleotide that hybridizes under low stringency conditions with (i) the mature polypeptide coding sequence of SEQ ID NO: 1, or (ii) the full-length complement of (i);

[0084] c) a polypeptide encoded by a polynucleotide having at least 60% identity to the mature polypeptide coding sequence of SEQ ID NO: 1; and/or

[0085] (d) a fragment of the mature polypeptide of SEQ ID NO: 2.

[0086] The alteration at one or more position may independently be selected among substitutions, insertions and deletions, where substitutions are preferred.

[0087] The invention also comprises introduction of a stop codon at a position from residue 497 to 585 (or equivalent position, relative to SEQ ID NO: 2) or from residue 497 (or equivalent position, relative to SEQ ID NO: 2) to the last residue of the mature sequence of the albumin. Introduction of a stop codon may be instead of or together with the one or more (several) alterations mentioned herein.

[0088] The invention allows the binding affinity (and therefore the half-life) of an albumin moiety for the FcRn receptor to be tailored to meet the requirements of a particular user or application. Such tailoring may range from a large increase in half-life to a small increase in half-life, a small decrease in half-life to a large decrease in half-life. The albumin moiety or moieties may therefore be used to tailor the half-life of fusion polypeptides, conjugates, associates, nanoparticles and compositions comprising the albumin moiety. The invention is particularly applicable to pharmaceuticals. Some pharmaceuticals benefit from a long half-life, e.g. to increase dosage intervals. Some pharmaceuticals benefit from a short plasma half-life, e.g. to accelerate clearance from the body of a patient. Therefore, use of an albumin moiety according to the invention in pharmaceuticals allows the half-life of the pharmaceutical to be tailored as desired.

### Definitions

[0089] Variant: The term “variant” means a polypeptide derived from a parent albumin by one or more (several) alteration(s), i.e., a substitution, insertion, and/or deletion, at one or more (several) positions. A substitution means a replacement of an amino acid occupying a position with a different amino acid; a deletion means removal of an amino acid occupying a position; and an insertion means adding 1 or more, such as 1, 2, 3, 4, 5, 6, 7, 8, 9 or 10, preferably 1-3 amino acids immediately adjacent an amino acid occupying a position. In relation to substitutions, ‘immediately adjacent’ may be to the N-side (‘upstream’) or C-side (‘downstream’) of the amino acid occupying a position (‘the named amino acid’). Therefore, for an amino acid named/numbered ‘X’, the insertion may be at position ‘X+1’ (‘downstream’) or at position ‘X−1’ (‘upstream’).

[0090] Mutant: The term “mutant” means a polynucleotide encoding a variant.

[0091] Wild-Type Albumin: The term “wild-type” (WT) albumin means albumin having the same amino acid sequence as naturally found in an animal or in a human being.

[0092] FcRn and shFcRn: The term “FcRn” means the human neonatal Fc receptor (FcRn). shFcRn is a soluble recombinant form of FcRn. hFcRn is a heterodimer of SEQ ID NO: 30 (truncated heavy chain of the major histocompatibility complex class I-like Fc receptor (FCGRT)) and SEQ ID NO: 31 (beta-2-microglobulin). Together, SEQ ID NO: 30 and 31 form hFcRn.

[0093] smFcRn: The term “smFcRn” is a soluble recombinant form of the mouse neonatal Fc Receptor.

[0094] Isolated variant: The term “isolated variant” means a variant that is modified by the hand of man and separated completely or partially from at least one component with which it naturally occurs. The variant may be at least 1% pure, e.g., at least 5% pure, at least 10% pure, at least 20% pure, at least 40% pure, at least 60% pure, at least 80% pure, and at least 90% pure, as determined by SDS-PAGE or GP-HPLC.

[0095] Substantially pure variant: The term “substantially pure variant” means a preparation that contains at most 10%, at most 8%, at most 6%, at most 5%, at most 4%, at most 3%, at most 2%, at most 1%, and at most 0.5% by weight of other polypeptide material with which it is natively or recombinantly associated. Preferably, the variant is at least 92% pure, e.g., at least 94% pure, at least 95% pure, at least 96% pure, at least 97% pure, at least 98% pure, at least 99%, at least 99.5% pure, and 100% pure by weight of the total polypeptide material present in the preparation. The variants of the invention are preferably in a substantially pure form. This can be accomplished, for example, by preparing the variant by well-known recombinant methods and by purification methods.

[0096] Mature polypeptide: The term “mature polypeptide” means a polypeptide in its final form following translation and any post-translational modifications, such as N-terminal processing, C-terminal truncation, glycosylation, phosphorylation, etc. The mature polypeptide may be amino acids 1 to 585 of SEQ ID NO: 2, with the inclusion of any post-translational modifications.

[0097] Mature polypeptide coding sequence: The term “mature polypeptide coding sequence” means a polynucleotide that encodes a mature albumin polypeptide. The mature polypeptide coding sequence may be nucleotides 1 to 1758 of SEQ ID NO: 1.

[0098] Sequence Identity: The relatedness between two amino acid sequences or between two nucleotide sequences is described by the parameter “sequence identity”.

[0099] For purposes of the invention, the degree of sequence identity between two amino acid sequences is determined using the Needleman-Wunsch algorithm (Needleman and Wunsch, 1970, J. Mol. Biol. 48: 443-453) as implemented in the Needle program of the EMBOSS package (EMBOSS: The European Molecular Biology Open Software Suite, Rice et al., 2000, Trends Genet. 16: 276-277), preferably version 3.0.0 or later. The optional parameters used are gap open penalty of 10, gap extension penalty of 0.5, and the EBLOSUM62 (EMBOSS version of BLOSUM62) substitution matrix. The output of Needle labelled “longest identity” (obtained using the −nobrief option) is used as the percent identity and is calculated as follows:

(Identical Residues×100)/(Length of Alignment−Total Number of Gaps in Alignment)

[0100] For purposes of the invention, the degree of sequence identity between two deoxyribonucleotide sequences is determined using the Needleman-Wunsch algorithm (Needleman and Wunsch, 1970, supra) as implemented in the Needle program of the EMBOSS package (EMBOSS: The European Molecular Biology Open Software Suite, Rice et al., 2000, supra), preferably version 3.0.0 or later. The optional parameters used are gap open penalty of 10, gap extension penalty of 0.5, and the EDNAFULL (EMBOSS version of NCBI NUC4.4) substitution matrix. The output of Needle labeled “longest identity” (obtained using the −nobrief option) is used as the percent identity and is calculated as follows:

(Identical Deoxyribonucleotides×100)/(Length of Alignment−Total Number of Gaps in Alignment)

[0101] Fragment: The term “fragment” means a polypeptide having one or more (several) amino acids deleted from the amino and/or carboxyl terminus of an albumin and/or an internal region of albumin that has retained the ability to bind to FcRn. Fragments may consist of one uninterrupted sequence derived from HSA or it may comprise two or more (several) sequences derived from HSA. The fragments according to the invention have a size of more than approximately 20 amino acid residues, preferably more than 30 amino acid residues, more preferred more than 40 amino acid residues, more preferred more than 50 amino acid residues, more preferred more than 75 amino acid residues, more preferred more than 100 amino acid residues, more preferred more than 200 amino acid residues, more preferred more than 300 amino acid residues, even more preferred more than 400 amino acid residues and most preferred more than 500 amino acid residues. A fragment may comprise or consist of one more domains of albumin such as DI+DII, DI+DIII, DII+DIII, DIII+DIII, DI+DIII+DIII, DIII+DIII+DIII, or fragments of such domains or combinations of domains.

[0102] Domains I, II and III may be defined with reference to HSA (SEQ ID NO: 2). For example, HSA domain I may consist of or comprise amino acids 1 to 194 (±1 to 15 amino acids) of SEQ ID NO: 2, HSA domain II may consist of or comprise amino acids 192 (±1 to 15 amino acids) to 387 (±1 to 15 amino acids) of SEQ ID NO: 2 and domain III may consist of or comprise amino acid residues 381 (±1 to 15 amino acids) to 585 (±1 to 15 amino acids) of SEQ ID NO: 2. “±1 to 15 amino acids” means that the residue number may deviate by 1, 2, 3, 4, 5, 6, 7, 8, 9, 10, 11, 12, 13, 14, or 15 amino acids to the C-terminus and/or to the N-terminus of the stated amino acid position. Examples of domains I, II and III are described by Dockal et al (The Journal of Biological Chemistry, 1999, Vol. 274(41): 29303-29310) and Kjeldsen et al (Protein Expression and Purification, 1998, Vol 13: 163-169) and are tabulated below.

| Amino acid residues of HSA domains I, | | |
|---|---|---|
| II and III with reference to SEQ ID NO: 2 | Dockal et al | Kjeldsen et al |
| Domain I | 1 to 197 | 1 to 192 |
| Domain II | 189 to 385 | 193 to 382 |
| Domain III | 381 to 585 | 383 to 585 |

[0103] The skilled person can identify domains I, II and III in non-human albumins by amino acid sequence alignment with HSA, for example using the Needleman-Wunsch algorithm (Needleman and Wunsch, 1970, J. Mol. Biol. 48: 443-453) as implemented in the Needle program of the EMBOSS package (EMBOSS: The European Molecular Biology Open Software Suite, Rice et al., 2000, Trends Genet. 16: 276-277), preferably version 3.0.0 or later. The optional parameters used are gap open penalty of 10, gap extension penalty of 0.5, and the EBLOSUM62 (EMBOSS version of BLOSUM62) substitution matrix. Other suitable software includes MUSCLE ((Multiple sequence comparison by log-expectation, Robert C. Edgar, Version 3.6, http://www.drive5.com/muscle; Edgar (2004) Nucleic Acids Research 32(5), 1792-97 and Edgar (2004) BMC Bioinformatics, 5(1):113) which may be used with the default settings as described in the User Guide (Version 3.6, September 2005). Versions of MUSCLE later than 3.6 may also be used for any aspect of the invention). Examples of suitable alignments are provided in FIGS. 1 and 2.

[0104] Allelic variant: The term “allelic variant” means any of two or more alternative forms of a gene occupying the same chromosomal locus. Allelic variation arises naturally through mutation, and may result in polymorphism within populations. Gene mutations can be silent (no change in the encoded polypeptide) or may encode polypeptides having altered amino acid sequences. An allelic variant of a polypeptide is a polypeptide encoded by an allelic variant of a gene.

[0105] Coding sequence: The term “coding sequence” means a polynucleotide, which directly specifies the amino acid sequence of its translated polypeptide product. The boundaries of the coding sequence are generally determined by an open reading frame, which usually begins with the ATG start codon or alternative start codons such as GTG and TTG and ends with a stop codon such as TAA, TAG, and TGA. The coding sequence may be a DNA, cDNA, synthetic, or recombinant polynucleotide.

[0106] cDNA: The term “cDNA” means a DNA molecule that can be prepared by reverse transcription from a mature, spliced, mRNA molecule obtained from a eukaryotic cell. cDNA lacks intron sequences that may be present in the corresponding genomic DNA. The initial, primary RNA transcript is a precursor to mRNA that is processed through a series of steps, including splicing, before appearing as mature spliced mRNA.

[0107] Nucleic acid construct: The term “nucleic acid construct” means a nucleic acid molecule, either single- or double-stranded, which is isolated from a naturally occurring gene or is modified to contain segments of nucleic acids in a manner that would not otherwise exist in nature or which is synthetic. The term nucleic acid construct is synonymous with the term “expression cassette” when the nucleic acid construct contains the control sequences required for expression of a coding sequence of the invention.

[0108] Control sequences: The term “control sequences” means all components necessary for the expression of a polynucleotide encoding a variant of the invention. Each control sequence may be native or foreign to the polynucleotide encoding the variant or native or foreign to each other. Such control sequences include, but are not limited to, a leader, polyadenylation sequence, propeptide sequence, promoter, signal peptide sequence, and transcription terminator. At a minimum, the control sequences include a promoter, and transcriptional and translational stop signals. The control sequences may be provided with linkers for the purpose of introducing specific restriction sites facilitating ligation of the control sequences within the coding region of the polynucleotide encoding a variant.

[0109] Operably linked: The term “operably linked” means a configuration in which a control sequence is placed at an appropriate position relative to the coding sequence of a polynucleotide such that the control sequence directs the expression of the coding sequence.

[0110] Expression: The term “expression” includes any step involved in the production of the variant including, but not limited to, transcription, post-transcriptional modification, translation, post-translational modification, and secretion.

[0111] Expression vector: The term “expression vector” means a linear or circular DNA molecule that comprises a polynucleotide encoding a variant and is operably linked to additional nucleotides that provide for its expression.

[0112] Host cell: The term “host cell” means any cell type that is susceptible to transformation, transfection, transduction, and the like with a nucleic acid construct or expression vector comprising a polynucleotide of the invention. The term “host cell” encompasses any progeny of a parent cell that is not identical to the parent cell due to mutations that occur during replication.

[0113] Plasma half-life: Plasma half-life is ideally determined in vivo in suitable individuals. However, since it is time consuming and expensive and there inevitable are ethical concerns connected with doing experiments in animals or man it is desirable to use an in vitro assay for determining whether plasma half-life is extended or reduced. It is known that the binding of albumin to its receptor FcRn is important for plasma half-life and the correlation between receptor binding and plasma half-life is that a higher affinity of albumin to its receptor leads to longer plasma half-life. Thus for the invention a higher affinity of albumin to FcRn is considered indicative of an increased plasma half-life and a lower affinity of albumin to its receptor is considered indicative of a reduced plasma half-life.

[0114] In this application and claims the binding of albumin to its receptor FcRn is described using the term affinity and the expressions “stronger” or “weaker”. Thus, it should be understood that a molecule having a higher affinity to FcRn than HSA is considered to bind stronger to FcRn than HSA and a molecule having a lower affinity to FcRn than HSA is considered to bind weaker to FcRn than HSA.

[0115] The terms “longer plasma half-life” or “shorter plasma half-life” and similar expressions are understood to be in relationship to the corresponding parent or reference or corresponding albumin molecule. Thus, a longer plasma half-life with respect to a variant albumin of the invention means that the variant has longer plasma half-life than the corresponding albumin having the same sequences except for the alteration(s) described herein, e.g. at one or more (several) positions corresponding to 30 to 41, 75 to 91, 104 to 120, 144 to 150, 186 to 201, 414 to 426, 457 to 472, 492 to 538, 550 to 585, 276, 410, and/or 411 of the mature polypeptide of SEQ ID NO: 2, wherein, it is preferred that, when the variant, fragment or fusion polypeptide comprises one or more (several) alterations selected from (i) the group consisting of positions 417, 464, 492, 493, 494, 495, 496, 499, 500, 501, 503, 504, 505, 506, 510, 535, 536, 537, 538, 540, 550, 573, 574, 575, 577, 578, 579, 580, 581, 582 and 584, (ii) the group consisting of positions 34, 38, 40, 75, 76, 80, 82, 83, 86, 90, 91, 104, 113, 115, 116, 200, 461, 471, 496, 498, 501, 503, 504, 505, 506, 512, 514, 538, 550, 558, 559, 560, 562, 564, 565, 567, 573, 574, 577, 578, 579, 580, 581, 582, 584, 585 (particularly an alteration of one or more (several) of positions 34, 38, 40, 76, 80, 82, 83, 86, 104, 113, 115, 116, 471, 496, 498, 501, 503, 504, 505, 506, 512, 538, 550, 560, 562, 564, 565, 573, 574, 577, 578, 579, 580, 581, 582, 584, 585 from the native residue (e.g. non-Cys residue) to Cys and/or a deletion of or substitution of one or more (several) of positions 91, 200, 461, 514, 558, 559, 567 from Cys, to a non-Cys residue), or the group consisting of positions (iii) 63, 82, 84, 87, 90, 106, 114, 119, 146, 464, 201, 494, 501, 503, 505, 510, 513, 518, 525, 529, 533, 535, 536, 537, 550, 550, 557, 560, 563, 565, 570, 573, 574, 574, 584 (particularly one or more of (several) D63N, E82K, E84K, D87N, L90P, K106E, R114G, E119K, V146E, H464A, H464N, C201F, D494N, E501K, E503K, E505K, H510A, I513N, D518N, K525E, E529K, V533M, H535A, K536E, I537N, D550G, D550A, V557M, K560E, D563N, E565K, E570K, K573E, K574N, K574E, K584E); the polypeptide also comprises one or more alterations at a position selected from group consisting of positions 30, 31, 32, 33, 34, 35, 36, 37, 38, 39, 40, 41, 75, 76, 77, 78, 79, 80, 81, 82, 83, 84, 85, 86, 87, 88, 89, 90, 91, 104, 105, 106, 107, 108, 109, 110, 111, 112, 113, 114, 115, 116, 117, 118, 119, 120, 144, 145, 146, 147, 148, 149, 150, 186, 187, 188, 189, 190, 191, 192, 193, 194, 195, 196, 197, 198, 199, 200, 201, 276, 410, 411, 414, 415, 416, 418, 419, 420, 421, 422, 423, 424, 425, 426, 457, 458, 459, 460, 461, 462, 463, 465, 466, 467, 468, 469, 470, 471, 472, 497, 498, 502, 507, 508, 509, 511, 512, 513, 514, 515, 516, 517, 518, 519, 520, 521, 522, 523, 524, 525, 526, 527, 528, 529, 530, 531, 532, 533, 534, 551, 552, 553, 554, 555, 556, 557, 558, 559, 560, 561, 562, 563, 564, 565, 567, 568, 569, 570, 571, 572, 576, 583, 585 and/or a stop codon inserted or substituted at a position selected from 497 to 585, or from residue 497 (or equivalent position, relative to SEQ ID NO: 2) to the last residue of the mature sequence of the albumin. Introduction of a stop mutation may be instead of or together with the one or more (several) alterations mentioned herein.

[0116] Reference: a reference is an albumin, fusion, conjugate, composition, associate or nanoparticle to which an albumin variant, fusion, conjugate, composition, associate or nanoparticle is compared. The reference may comprise or consist of full length albumin (such as HSA or a natural allele thereof) of a fragment thereof. A reference may also be referred to as a ‘corresponding’ albumin, fusion, conjugate, composition, associate or nanoparticle to which an albumin variant, fusion, conjugate, composition, associate or nanoparticle. A reference may comprise or consist of HSA (SEQ ID NO: 2) or a fragment, fusion, conjugate, associate, nanoparticle or microparticle thereof. Preferably, the reference is identical to the polypeptide, fusion polypeptide, conjugate, composition, associate, nanoparticle or microparticle according to the invention (“being studied”) with the exception of the albumin moiety. Preferably the albumin moiety of the reference comprises or consists of an albumin (e.g. HSA, SEQ ID NO: 2) or a fragment thereof. The amino acid sequence of the albumin moiety of the reference may be longer than, shorter than or, preferably, the same (±1 to 15 amino acids) length as the amino sequence of the albumin moiety of the polypeptide, fusion polypeptide, conjugate, composition, associate, nanoparticle or microparticle according to the invention (“being studied”).

[0117] Equivalent amino acid positions: Throughout this specification amino acid positions are defined in relation to full-length mature human serum albumin (i.e. without leader sequence, SEQ ID NO: 2). However, the skilled person understands that the invention also relates to variants of non-human albumins e.g. those disclosed herein) and/or fragments of a human or non-human albumin. Equivalent positions can be identified in fragments of human serum albumin, in animal albumins and in fragments, fusions and other derivative or variants thereof by comparing amino acid sequences using pairwise (e.g. ClustalW) or multiple (e.g. MUSCLE) alignments. For example, FIG. 1 shows that positions equivalent to 500, 550 and 573 in full length human serum albumin are easily identified in fragments of human serum albumin and in albumins of other species. Positions 500, 550 and 573 are indicated by arrows. Further details are provided in Table 1 below.

TABLE 1
Example of identification of equivalent positions in HSA, animal albumins and albumin fragments

| | Albumin | | | Position equivalent to human serum albumin | | |
|---|---|---|---|---|---|---|
| Organism (accession | Full length or | Fragment | Total length of | (native amino acid): | | |
| number of protein) | fragment | details | mature protein | 500 (K) | 550 (D) | 573 (K) |
| Homo sapiens | Full length | — | 585 | 500 (K) | 550 (D) | 573 (K) |
| (AAA98797) | | | | | | |
| Homo sapiens | Fragment | DI, DIII | 399 | 314 (K) | 364 (D) | 387 (K) |
| Homo sapiens | Fragment | DI, DIII | 403 | 318 (K) | 368 (D) | 391 (K) |
| Macaca mulatta | Full length | — | 584 | 500 (K) | 550 (N) | 573 (P) |
| (NP_001182578) | | | | | | |
| Rattus norvegicus | Full length | — | 584 | 500 (K) | 550 (D) | 573 (P) |
| (AAH85359) | | | | | | |
| Mus musculus | Full length | — | 584 | 500 (K) | 550 (D) | 573 (P) |
| (AAH49971) | | | | | | |

[0118] FIG. 1 was generated by MUSCLE using the default parameters including output in ClustalW 1.81 format. The raw output data was shaded using BoxShade 3.21 (http://www.ch.embnet.orq/software/BOX_form.html) using Output Format: RTF_new; Font Size: 10; Consensus Line: no consensus line; Fraction of sequences (that must agree for shading): 0.5; Input sequence format: ALN. Therefore, throughout this specification amino acid positions defined in human serum albumin also apply to equivalent positions in fragments, derivatives or variants and fusions of human serum albumin, animals from other species and fragments and fusions thereof. Such equivalent positions may have (i) a different residue number in its native protein and/or (ii) a different native amino acid in its native protein.

[0119] Likewise, FIG. 2 shows that equivalent positions can be identified in fragments (e.g. domains) of an albumin with reference to SEQ ID NO: 2 (HSA).

### Conventions for Designation of Variants

[0120] For purposes of the invention, the mature polypeptide disclosed in SEQ ID NO: 2 is used to determine the corresponding amino acid residue in another albumin. The amino acid sequence of another albumin is aligned with the mature polypeptide disclosed in SEQ ID NO: 2, and based on the alignment, the amino acid position number corresponding to any amino acid residue in the mature polypeptide disclosed in SEQ ID NO: 2 is determined using the Needleman-Wunsch algorithm (Needleman and Wunsch, 1970, J. Mol. Biol. 48: 443-453) as implemented in the Needle program of the EMBOSS package (EMBOSS: The European Molecular Biology Open Software Suite, Rice et al., 2000, Trends Genet. 16: 276-277), preferably version 3.0.0 or later.

[0121] Identification of the corresponding amino acid residue in another albumin can be confirmed by an alignment of multiple polypeptide sequences using “ClustalW” (Larkin et al., 2007, Bioinformatics 23: 2947-2948).

[0122] When the other polypeptide (or protein) has diverged from the mature polypeptide of SEQ ID NO: 2 such that traditional sequence-based comparison fails to detect their relationship (Lindahl and Elofsson, 2000, J. Mol. Biol. 295: 613-615), other pairwise sequence comparison algorithms can be used. Greater sensitivity in sequence-based searching can be attained using search programs that utilize probabilistic representations of polypeptide families (profiles) to search databases. For example, the PSI-BLAST program generates profiles through an iterative database search process and is capable of detecting remote homologs (Atschul et al., 1997, Nucleic Acids Res. 25: 3389-3402). Even greater sensitivity can be achieved if the family or superfamily for the polypeptide has one or more representatives in the protein structure databases. Programs such as GenTHREADER (Jones, 1999, J. Mol. Biol. 287: 797-815; McGuffin and Jones, 2003, Bioinformatics 19: 874-881) utilize information from a variety of sources (PSI-BLAST, secondary structure prediction, structural alignment profiles, and solvation potentials) as inputs to a neural network that predicts the structural fold for a query sequence. Similarly, the method of Gough et al., 2000, J. Mol. Biol. 313: 903-919, can be used to align a sequence of unknown structure within the superfamily models present in the SCOP database. These alignments can in turn be used to generate homology models for the polypeptide, and such models can be assessed for accuracy using a variety of tools developed for that purpose.

[0123] For proteins of known structure, several tools and resources are available for retrieving and generating structural alignments. For example the SCOP superfamilies of proteins have been structurally aligned, and those alignments are accessible and downloadable. Two or more protein structures can be aligned using a variety of algorithms such as the distance alignment matrix (Holm and Sander, 1998, Proteins 33: 88-96) or combinatorial extension (Shindyalov and Bourne, 1998, Protein Engineering 11: 739-747), and implementations of these algorithms can additionally be utilized to query structure databases with a structure of interest in order to discover possible structural homologs (e.g., Holm and Park, 2000, Bioinformatics 16: 566-567).

[0124] In describing the albumin variants of the invention, the nomenclature described below is adapted for ease of reference. The accepted IUPAC single letter or three letter amino acid abbreviation is employed. The term ‘point mutation’ and/or ‘alteration’ includes deletions, insertions and substitutions.

[0125] Substitutions.

[0126] For an amino acid substitution, the following nomenclature is used: Original amino acid, position, substituted amino acid. Accordingly, for example the substitution of threonine with alanine at position 226 is designated as “Thr226Ala” or “T226A”. Multiple mutations (or alterations) are separated by addition marks (“+”), e.g., “Gly205Arg+Ser411Phe” or “G205R+S411F”, representing substitutions at positions 205 and 411 of glycine (G) with arginine (R) and serine (S) with phenylalanine (F), respectively. The Figures also use (“/”), e.g., “E492T/N503D” this should be viewed as interchangeable with (“+”).

[0127] Deletions.

[0128] For an amino acid deletion, the following nomenclature is used: Original amino acid, position*. Accordingly, the deletion of glycine at position 195 is designated as “Gly195*” or “G195*”. Multiple deletions are separated by addition marks (“+”), e.g., “Gly195*+Ser411*” or “G195*+S411*”.

[0129] Insertions.

[0130] As disclosed above, an insertion may be to the N-side (‘upstream’, ‘X-1’) or C-side (‘downstream’, ‘X+1’) of the amino acid occupying a position (‘the named (or original) amino acid’, ‘X’).

[0131] For an amino acid insertion to the C-side (‘downstream’, ‘X+1’) of the original amino acid (‘X’), the following nomenclature is used: Original amino acid, position, original amino acid, inserted amino acid. Accordingly the insertion of lysine after glycine at position 195 is designated “Gly195GlyLys” or “G195GK”. An insertion of multiple amino acids is designated [Original amino acid, position, original amino acid, inserted amino acid #1, inserted amino acid #2; etc.]. For example, the insertion of lysine and alanine after glycine at position 195 is indicated as “Gly195GlyLysAla” or “G195GKA”.

[0132] In such cases the inserted amino acid residue(s) are numbered by the addition of lower case letters to the position number of the amino acid residue preceding the inserted amino acid residue(s). In the above example, the sequence would thus be:

| Parent: | Variant: |
|---|---|
| 195 | 195 195a 195b |
| G | G - K - A |

[0133] For an amino acid insertion to the N-side (‘upstream’, ‘X-1’) of the original amino acid (X), the following nomenclature is used: Original amino acid, position, inserted amino acid, original amino acid. Accordingly the insertion of lysine (K) before glycine (G) at position 195 is designated “Gly195LysGly” or “G195KG”. An insertion of multiple amino acids is designated [Original amino acid, position, inserted amino acid #1, inserted amino acid #2; etc., original amino acid]. For example, the insertion of lysine (K) and alanine (A) before glycine at position 195 is indicated as “Gly195LysAlaGly” or “G195KAG”. In such cases the inserted amino acid residue(s) are numbered by the addition of lower case letters with prime to the position number of the amino acid residue following the inserted amino acid residue(s). In the above example, the sequence would thus be:

| Parent: | Variant: |
|---|---|
| 195 | 195a′ 195b′ 195 |
| G | K - A - G |

[0134] Multiple Alterations.

[0135] Variants comprising multiple alterations are separated by addition marks (“+”), e.g., “Arg170Tyr+Gly195Glu” or “R170Y+G195E” representing a substitution of tyrosine and glutamic acid for arginine and glycine at positions 170 and 195, respectively.

[0136] Different Substitutions.

[0137] Where different substitutions can be introduced at a position, the different substitutions are separated by a comma, e.g., “Arg170Tyr,Glu” represents a substitution of arginine with tyrosine or glutamic acid at position 170. Thus, “Tyr167Gly,Ala+Arg170Gly,Ala” designates the following variants: “Tyr167Gly+Arg170Gly”, “Tyr167Gly+Arg170Ala”, “Tyr167Ala+Arg170Gly”, and “Tyr167Ala+Arg170Ala”.

### Parent Albumin

[0138] Albumins are proteins and constitute the most abundant protein in plasma in mammals and albumins from a long number of mammals have been characterized by biochemical methods and/or by sequence information. Several albumins, e.g., human serum albumin (HSA), have also been characterized crystallographically and the structure determined (HSA: He X M, Carter D C (July 1992). “Atomic structure and chemistry of human serum albumin”. Nature 358 (6383): 209-15; horse albumin: Ho, J. X. et al. (2001). X-ray and primary structure of horse serum albumin (Equus caballus) at 0.27-nm resolution. Eur J Biochem. 215(1):205-12).

[0139] The term “parent” or “parent albumin” means an albumin to which an alteration is made by the hand of man to produce the albumin variants of the invention. The parent may be a naturally occurring (wild-type) polypeptide or an allele thereof, or even a variant thereof.

[0140] The term “albumin” means a protein having the same and/or very similar three dimensional structure as HSA or HSA domains and has similar properties. Similar three dimensional structures are for example the structures of the albumins from the species mentioned under parent albumin. Some of the major properties of albumin is its ability to regulate of plasma volume since it contributes to 85% of the osmotic effect of normal plasma, a long plasma half-life of around 19 days±5 days, ligand-binding, e.g. binding of endogenous molecules such as acidic, lipophilic compounds including bilirubin, fatty acids, hemin and thyroxine (see also Table 1 of Kragh-Hansen et al, 2002, Biol. Pharm. Bull. 25, 695, hereby incorporated by reference), binding of small organic compounds with acidic or electronegative features e.g. drugs such as warfarin, diazepam, ibuprofen and paclitaxel (see also Table 1 of Kragh-Hansen et al, 2002, Biol. Pharm. Bull. 25, 695, hereby incorporated by reference). Not all of these properties need to be fulfilled to in order to characterize a protein or fragment as an albumin.

[0141] HSA is a preferred albumin according to the invention and is a protein consisting of 585 amino acid residues and has a molecular weight of 67 kDa. In its natural form it is not glycosylated. The amino acid sequence of HSA is shown in SEQ ID NO: 2. The skilled person will appreciate that natural alleles may exist having essentially the same properties as HSA but having one or more amino acid changes compared to SEQ ID NO: 2, and the inventors also contemplate the use of such natural alleles as parent albumin according to the invention.

[0142] Albumins have generally a long plasma half-life of approximately 20 days or longer, e.g., HSA has a plasma half-life of 19 days. It is known that the long plasma half-life of HSA is mediated via interaction with its receptor FcRn, however, an understanding or knowledge of the exact mechanism behind the long half-life of HSA is not essential for the invention.

[0143] According to the invention the term “albumin” means a protein having the same, or very similar three dimensional structure as HSA and having a long plasma half-life. As examples of albumin proteins according to the invention can be mentioned human serum albumin (e.g. AAA98797 or P02768-1, SEQ ID NO: 2 (mature), SEQ ID NO: 4 (immature)), primate serum albumin, (such as chimpanzee serum albumin (e.g. predicted sequence XP_517233.2 SEQ ID NO: 5), gorilla serum albumin or macaque serum albumin (e.g. NP_001182578, SEQ ID NO: 6), rodent serum albumin (such as hamster serum albumin (e.g. A6YF56, SEQ ID NO: 7), guinea pig serum albumin (e.g. Q6WDN9-1, SEQ ID NO: 8), mouse serum albumin (e.g. AAH49971 or P07724-1 Version 3, SEQ ID NO: 9) and rat serum albumin (e.g. AAH85359 or P02770-1 Version 2, SEQ ID NO: 10))), bovine serum albumin (e.g. cow serum albumin P02769-1, SEQ ID NO: 11), equine serum albumin such as horse serum albumin (e.g. P35747-1, SEQ ID NO: 12) or donkey serum albumin (e.g. Q5XLE4-1, SEQ ID NO: 13), rabbit serum albumin (e.g. P49065-1 Version 2, SEQ ID NO: 14), goat serum albumin (e.g. ACF10391, SEQ ID NO: 15), sheep serum albumin (e.g. P14639-1, SEQ ID NO: 16), dog serum albumin (e.g. P49822-1, SEQ ID NO: 17), chicken serum albumin (e.g. P19121-1 Version 2, SEQ ID NO: 18) and pig serum albumin (e.g. P08835-1 Version 2, SEQ ID NO: 19) or a polypeptide having at least 70, 75, 80, 85, 90, 91, 92, 93, 94, 95, 96, 97, 98 or at least 99% amino acid identity to such an albumin. The parent or reference albumin may be an artificial variant such as HSA K573P (SEQ ID NO: 3) or a chimeric albumin such as the N-terminal of HSA and the C-terminal of macaca albumin (SEQ ID NO: 20), N-terminal of HSA and the C-terminal of mouse albumin (SEQ ID NO: 21), N-terminal of HSA and the C-terminal of rabbit albumin (SEQ ID NO: 22), N-terminal of HSA and the C-terminal of sheep albumin (SEQ ID NO: 23).

[0144] Other examples of albumin, which are also included in the scope of this application, include ovalbumin (e.g. P01012.pro: chicken ovalbumin; 073860.pro: turkey ovalbumin). HSA as disclosed in SEQ ID NO: 2 or any naturally occurring allele thereof, is the preferred albumin according to the invention.

[0145] The parent albumin, a fragment thereof, or albumin part of a fusion polypeptide comprising albumin or a fragment thereof according to the invention has generally a sequence identity to the sequence of HSA shown in SEQ ID NO: 2 of at least 60%, preferably at least 70%, preferably at least 80%, preferably at least 85%, preferably at least 86%, preferably at least 87%, preferably at least 88%, preferably at least 89%, preferably at least 90%, preferably at least 91%, preferably at least 92%, preferably at least 93%, preferably at least 94%, preferably at least 95%, more preferred at least 96%, more preferred at least 97%, more preferred at least 98% and most preferred at least 99%. The sequence identity may be over the full-length of SEQ ID NO: 2 or over a molecule consisting or comprising of a fragment such as one or more domains of SEQ ID NO: 2 such as a molecule consisting of or comprising domain III (e.g. SEQ ID NO: 27), a molecule consisting of or comprising domain II and domain III (e.g. SEQ ID NO: 25), a molecule consisting of or comprising domain I and domain III (e.g. SEQ ID NO: 24), a molecule consisting of or comprising two copies of domain III (e.g. SEQ ID NO: 26), a molecule consisting of or comprising three copies of domain III (e.g. SEQ ID NO: 28) or a molecule consisting of or comprising domain I and two copies of domain III (e.g. SEQ ID NO: 29).

[0146] The parent preferably comprises or consists of the amino acid sequence of SEQ ID NO: 4. The parent may comprise or consist of the mature polypeptide of SEQ ID NO: 2.

[0147] In another embodiment, the parent is an allelic variant of the mature polypeptide of SEQ ID NO: 2.

[0148] The parent albumin many be encoded by a polynucleotide that hybridizes under very low stringency conditions, low stringency conditions, medium stringency conditions, medium-high stringency conditions, high stringency conditions, or very high stringency conditions with (i) the mature polypeptide coding sequence of SEQ ID NO: 1, (ii) the mature polypeptide coding sequence of SEQ ID NO: 1, or (iii) the full-length complementary strand of (i) or (ii) (J. Sambrook, E. F. Fritsch, and T. Maniatis, 1989, Molecular Cloning, A Laboratory Manual, 2d edition, Cold Spring Harbor, N.Y.).

[0149] The polynucleotide of SEQ ID NO: 1 or a subsequence thereof, as well as the amino acid sequence of SEQ ID NO: 2 or a fragment thereof, may be used to design nucleic acid probes to identify and clone DNA encoding a parent from strains of different genera or species according to methods well known in the art. In particular, such probes can be used for hybridization with the genomic or cDNA of the genus or species of interest, following standard Southern blotting procedures, in order to identify and isolate the corresponding gene therein. Such probes can be considerably shorter than the entire sequence, but should be at least 14, e.g., at least 25, at least 35, or at least 70 nucleotides in length. Preferably, the nucleic acid probe is at least 100 nucleotides in length, e.g., at least 200 nucleotides, at least 300 nucleotides, at least 400 nucleotides, at least 500 nucleotides, at least 600 nucleotides, at least 700 nucleotides, at least 800 nucleotides, or at least 900 nucleotides in length. Both DNA and RNA probes can be used. The probes are typically labelled for detecting the corresponding gene (for example, with ³²P, ³H, ³⁵S, biotin, or avidin). Such probes are encompassed by the invention.

[0150] A genomic DNA or cDNA library prepared from such other organisms may be screened for DNA that hybridizes with the probes described above and encodes a parent. Genomic or other DNA from such other organisms may be separated by agarose or polyacrylamide gel electrophoresis, or other separation techniques. DNA from the libraries or the separated DNA may be transferred to and immobilized on nitrocellulose or other suitable carrier material. In order to identify a clone or DNA that is homologous with SEQ ID NO: 1 or a subsequence thereof, the carrier material is used in a Southern blot.

[0151] For purposes of the invention, hybridization indicates that the polynucleotide hybridizes to a labelled nucleotide probe corresponding to the polynucleotide shown in SEQ ID NO: 1, its complementary strand, or a subsequence thereof, under low to very high stringency conditions. Molecules to which the probe hybridizes can be detected using, for example, X-ray film or any other detection means known in the art.

[0152] The nucleic acid probe may comprise or consist of the mature polypeptide coding sequence of SEQ ID NO: 1, i.e. nucleotides 1 to 1785 of SEQ ID NO: 1. The nucleic acid probe may comprise or consist of a polynucleotide that encodes the polypeptide of SEQ ID NO: 2 or a fragment thereof.

[0153] For long probes of at least 100 nucleotides in length, very low to very high stringency conditions are defined as pre-hybridization and hybridization at 42° C. in 5×SSPE, 0.3% SDS, 200 micrograms/ml sheared and denatured salmon sperm DNA, and either 25% formamide for very low and low stringencies, 35% formamide for medium and medium-high stringencies, or 50% formamide for high and very high stringencies, following standard Southern blotting procedures for 12 to 24 hours optimally. The carrier material is finally washed three times each for 15 minutes using 2×SSC, 0.2% SDS at 45° C. (very low stringency), 50° C. (low stringency), 55° C. (medium stringency), 60° C. (medium-high stringency), 65° C. (high stringency), or 70° C. (very high stringency).

[0154] For short probes that are about 15 nucleotides to about 70 nucleotides in length, stringency conditions are defined as pre-hybridization and hybridization at about 5° C. to about 10° C. below the calculated Tₘ using the calculation according to Bolton and McCarthy (1962, Proc. Natl. Acad. Sci. USA 48: 1390) in 0.9 M NaCl, 0.09 M Tris-HCl pH 7.6, 6 mM EDTA, 0.5% NP-40, 1×Denhardt's solution, 1 mM sodium pyrophosphate, 1 mM sodium monobasic phosphate, 0.1 mM ATP, and 0.2 mg of yeast RNA per ml following standard Southern blotting procedures for 12 to 24 hours optimally. The carrier material is finally washed once in 6×SCC plus 0.1% SDS for 15 minutes and twice each for 15 minutes using 6×SSC at 5° C. to 10° C. below the calculated Tₘ.

[0155] The parent may be encoded by a polynucleotide with a sequence identity to the mature polypeptide coding sequence of SEQ ID NO: 1 of at least 60%, e.g., at least 65%, at least 70%, at least 75%, at least 80%, at least 85%, at least 90%, at least 95%, at least 96%, at least 97%, at least 98%, at least 99%, or 100%, which encodes a polypeptide which is able to function as an albumin. In an embodiment, the parent is encoded by a polynucleotide comprising or consisting of SEQ ID NO: 1.

### Albumin Moiety

[0156] The albumin part of a fusion polypeptide, conjugate, associate, nanoparticle or composition comprising the albumin variant or fragment thereof according to the invention, may be referred to as an ‘albumin moiety’ or ‘albumin component’. A polypeptide according to the invention may comprise or consist of an albumin moiety.

[0157] Particular aspects of the invention are discussed below:

### Preparation of Variants

[0158] A first aspect of the invention relates to a method for preparing a polypeptide which is a variant albumin, fragment thereof, or fusion polypeptide comprising variant albumin or a fragment thereof, preferably having a binding affinity to FcRn (preferably shFcRn) or half-life (e.g. in plasma) which is altered relative to a reference albumin, the method comprising the steps of:
[0159] a. Identifying one or more (several) amino acid residue positions being important for the binding of albumin to FcRn or half-life (e.g. in plasma), in an albumin or a fragment thereof or the albumin part of a fusion polypeptide comprising albumin or a fragment thereof;
[0160] b. Providing a nucleic acid encoding said albumin, the fragment thereof or the albumin part of a fusion polypeptide comprising albumin or the fragment thereof;
[0161] c. Modifying the nucleic acid provided in b., so that the one or more (several) amino acid residue located at the positions identified in a., there is an alteration such as a deletion, substitution or an insertion, most preferably a substitution;
[0162] d. Expressing the modified nucleic acid in a suitable host cell; and
[0163] e. Recovering the variant albumin, the fragment thereof or the fusion polypeptide comprising variant albumin or the fragment thereof.

[0164] The identification of one or more (several) amino acid residue positions being important for the binding of albumin to FcRn or half-life (e.g. in plasma), in albumin, fragment thereof or the albumin part of a fusion polypeptide can be done in several ways including, but not limited to, random mutagenesis followed by analysis of the generated mutants and comparison with the non-mutated parent or reference molecule, and identification based on structural considerations optionally followed by generation of variants having the identified alterations and comparison with the non-mutated patent molecule.

[0165] Reference albumins are disclosed herein, it is particularly preferred that the reference albumin is HSA (SEQ ID No: 2).

[0166] A preferred method for identification of one or more (several) amino acid residue positions to be changed to in order to prepare a variant HSA having an altered binding to FcRn or half-life (e.g. in plasma) compared with natural HSA, comprises the following steps:
[0167] i) providing a three dimensional structure (model) of an albumin, such as HSA;
[0168] ii) providing a three dimensional structure (model) of FcRn;
[0169] iii) using the albumin structure of (i) and the FcRn structure of (ii) to model the structure of the complex formed by albumin and FcRn when bound together, thus generating a ‘docking model’;
[0170] iv) using the docking model to identify amino acid residues in the albumin which interact with FcRn or are involved in the interaction with FcRn;

[0171] Step iii) and iv) can be done using techniques well known to the skilled person.

[0172] The docking model may be prepared using any suitable method or software. Suitable software includes fast fourier based software such as ZDOCK Fast Fourier Transform based protein docking program (Chen R et al (2003). Proteins 52(1):80-87). With regards construction of a docking model for FcRn and albumin, it is preferred that the model of albumin comprises domain III and at least one of domain I or domain II, preferably all domains. Preferably the albumin is HSA (e.g. SEQ ID NO: 2). Preferably, the model of albumin is resolved at pH 7 to 8. The model of albumin may be, or be based on the crystal structure of HSA at 2.5A (PDB code 1bm0 (Sugio S et al (1999) Protein Eng 12(6):439-446). Preferably the FcRn is a human FcRn and most preferably soluble human FcRn. It is preferred that the model of FcRn is solved at a pH lower than 6.4, for example at a pH equal to or lower than pH 6.3, 6.2, 6.1, 6, 5.9, 5.8, 5.7, 5.6, 5.5, 5.4, 5.3, 5.2, 5.1, 5.0, 4.9, 4.8, 4.7, 4.6, 4.5, 4.4, 4.3, 4.2, 4.1, 4.0, 3.9, 3.8, 3.7, 3.6, 3.5, 3.4, 3.3, 3.2, 3.1, 3.0. More preferably the pH is from 3.7 to 4.7, 4.0 to 4.4 and most preferably 4.2. An advantage of a low pH is that it is more representative of the natural physiological environment in which albumin and FcRn bind. The model of FcRn may be, or be based on, the 2.7A resolution structure of FcRn at pH 8.2 (PDB code 1exu).

[0173] A second FcRn model may be used in addition to the first FcRn model and it is preferred that the second model is solved at a different pH to the first model, e.g. a higher pH such as a pH equal to or higher than 6.4, 6.8, 7.0, 7.2, 7.4, 7.6, 7.8, 8.0, 8.2, 8.4, 8.6, 8.8 or 9.0. An advantage of using an additional FcRn model is that the impact of pH on binding between FcRn and an albumin moiety can be studied. Thus, docking models created using FcRns solved at different pHs may be compared to identify amino acid residues which are involved in albumin-FcRn binding at one pH but not the other, i.e. pH-dependent binding.

[0174] Identification of amino acid residues in the albumin which interact with FcRn or are involved in the interaction with FcRn may be done manually and/or visually

[0175] Optionally, the method of preparing and/or method of identification may comprise comparing the primary structure and/or the tertiary structure of a second albumin (e.g. a non-human albumin) with the primary structure and/or the tertiary structure of the albumin of (i) to identify equivalent amino acids to those identified in (iv). Primary structure comparison may be done by sequence alignment between the second albumin and the albumin of (i). Secondary structure comparison may be done using publicly available software such as PDBeFold (also known as SSM), an interactive service for comparing protein structures in 3D (e.g. Version 2.36 or later, available at http://www.ebi.ac.uk/msd-srv/ssm/ and described in publications such as Krissinel et al (2004) Acta Cryst. D 60, 2256-2268 and Krissinel (2007) Bioinformatics 23, 717-723).

[0176] Optionally, the method of preparing and/or method of identification may comprise preparing variants of albumin at the positions identified in (iv) or (v) and confirming (e.g. by binding affinity analysis) that the prepared variants have altered binding to FcRn compared to a reference such as the albumin of (i). Binding affinity analysis may be carried out by surface plasmon resonance (e.g. as disclosed herein) and/or by ELISA (e.g. as disclosed in WO2011/051489 (PCT/EP10/066572), incorporated herein by reference) and/or confirming that the prepared variants have altered half-lives, e.g. in plasma, compared a reference such as the albumin of (i). However, the skilled person will appreciate that other methods may be used to identify polypeptides having different binding properties to FcRn than HSA, and that the method is not dependent on how the polypeptide, having different binding properties to FcRn, has been identified.

[0177] According to the first aspect of the invention, preferably the amino acid resides of albumin which affect the binding of the albumin to FcRn or half-life (e.g. in plasma) are located in one or more (several) of the following regions: (a) 505, 531, 524, 472, 108, 190, 197 and 425; (b) 492 to 538; (c) 186 to 201; (d) 457 to 472; (e) 414 to 426; (f) 104 to 120; (g) 75 to 91; (h) 144 to 150; (i) 30 to 41, (j) 550 to 585 and (k) 276, 410 and 414 with one or more (several) of A, C, D, E, F, G, H, I, K, L, M, N, P, Q, R, S, T, V, W, Y and/or a stop codon at a position from 497 to 585; wherein, it is preferred that, when the polypeptide comprises one or more (several) alterations selected from (i) the group consisting of positions 417, 464, 492, 493, 494, 495, 496, 499, 500, 501, 503, 504, 505, 506, 510, 535, 536, 537, 538, 540, 550, 573, 574, 575, 577, 578, 579, 580, 581, 582 and 584, and/or (ii) the group consisting of positions 34, 38, 40, 75, 76, 80, 82, 83, 86, 90, 91, 104, 113, 115, 116, 200, 461, 471, 496, 498, 501, 503, 504, 505, 506, 512, 514, 538, 550, 558, 559, 560, 562, 564, 565, 567, 573, 574, 577, 578, 579, 580, 581, 582, 584, 585 (particularly a substitution of one or more (several) of positions 34, 38, 40, 76, 80, 82, 83, 86, 104, 113, 115, 116, 471, 496, 498, 501, 503, 504, 505, 506, 512, 538, 550, 560, 562, 564, 565, 573, 574, 577, 578, 579, 580, 581, 582, 584, 585 from the native residue (e.g. non-Cys residue) to Cys and/or a deletion of or substitution of one or more (several) of positions 91, 200, 461, 514, 558, 559, 567 from Cys, to a non-Cys residue), and/or the group consisting of positions (iii) 82, 114, 119, 464, 201, 505, 510, 513, 533, 535, 536, 550, 560, 563, 565, 573, 574 (particularly one or more of (several) D63N, E82K, E84K, D87N, L90P, K106E, R114G, E119K, V146E, H464A, H464N, C201F, D494N, E501K, E503K, E505K, H510A, I513N, D518N, K525E, E529K, V533M, H535A, K536E, I537N, D550G, D550A, V557M, K560E, D563N, E565K, E570K, K573E, K574N, K574E, K584E); the polypeptide also comprises one or more (several) alterations at a position selected from group consisting of positions 30, 31, 32, 33, 34, 35, 36, 37, 38, 39, 40, 41, 75, 76, 77, 78, 79, 80, 81, 82, 83, 84, 85, 86, 87, 88, 89, 90, 91, 104, 105, 106, 107, 108, 109, 110, 111, 112, 113, 114, 115, 116, 117, 118, 119, 120, 144, 145, 146, 147, 148, 149, 150, 186, 187, 188, 189, 190, 191, 192, 193, 194, 195, 196, 197, 198, 199, 200, 201, 276, 410, 411, 414, 415, 416, 418, 419, 420, 421, 422, 423, 424, 425, 426, 457, 458, 459, 460, 461, 462, 463, 465, 466, 467, 468, 469, 470, 471, 472, 497, 498, 502, 507, 508, 509, 511, 512, 513, 514, 515, 516, 517, 518, 519, 520, 521, 522, 523, 524, 525, 526, 527, 528, 529, 530, 531, 532, 533, 534, 551, 552, 553, 554, 555, 556, 557, 558, 559, 560, 561, 562, 563, 564, 565, 567, 568, 569, 570, 571, 572, 576, 583, 585 and/or a stop codon inserted or substituted at a position selected from 497 to 585 (positions are provided relative to SEQ ID NO: 2, however the invention also includes equivalent positions in sequences other than SEQ ID No: 2).

[0178] Furthermore introduction of a stop codon may be made at any of positions 497 to 585, i.e. any of positions 497, 498, 499, 500, 501, 502, 503, 504, 505, 506, 507, 508, 509, 510, 511, 512, 513, 514, 515, 516, 517, 518, 519, 520, 521, 522, 523, 524, 525, 526, 527, 528, 529, 530, 531, 532, 533, 534, 535, 536, 537, 538, 539, 540, 541, 542, 543, 544, 545, 546, 547, 548, 549, 550, 551, 552, 553, 554, 555, 556, 557, 558, 559, 560, 561, 562, 563, 564, 565, 566, 567, 568, 569, 570, 571, 572, 573, 574, 575, 576, 577, 578, 579, 580, 581, 582, 583, 584, 585, (or equivalent position, relative to SEQ ID NO: 2). The introduction may be made by insertion or substitution. Introduction of such a stop codon may be in addition to or instead of an alteration described herein.

[0179] Therefore, the first aspect of the invention provides an albumin variant or fragment thereof having altered binding affinity to FcRn compared with a parent or reference albumin, comprising an alteration (such as a substitution, deletion or insertion) at:
[0180] (a) one or more (several) positions corresponding to the following positions of SEQ ID No: 2: any of 30, 31, 32, 33, 35, 36, 37, 39, 41, 77, 78, 79, 81, 84, 85, 87, 88, 89, 105, 106, 107, 108, 109, 110, 111, 112, 117, 118, 120, 144, 145, 146, 147, 148, 149, 150, 186, 187, 188, 189, 190, 191, 192, 193, 194, 195, 196, 197; and/or
[0181] (b) one or more (several) positions corresponding to the following positions of SEQ ID No: 2: any of 189, 190, 191, 192, 193, 194, 195, 196, 197, 198, 199; and/or
[0182] (c) one or more (several) positions corresponding to the following positions of SEQ ID No: 2: 414, 415, 416, 418, 419, 420, 421, 422, 423, 424, 425, 426, 457, 458, 459, 460, 462, 463, 465, 466, 467, 468, 469, 470, 472, 497, 498, 502, 507, 508, 509, 511, 515, 516, 517, 518, 519, 520, 521, 522, 523, 524, 525, 526, 527, 528, 529, 530, 531, 532, 534, 551, 552, 553, 554, 555, 556, 557, 561, 566, 568, 569, 570, 571, 572, 576, 583
   wherein the altered binding affinity of the variant or fragment thereof is relative to the binding affinity of a reference such as a parent albumin or fragment which does not comprise the alteration.

[0183] The positions described in (a) (above) may be in a first Domain (e.g. Domain I) of a polypeptide such as an albumin, e.g. HSA. The positions described in (b) (above) may be in a second Domain (e.g. Domain II) of a polypeptide such as an albumin, e.g. HSA. The positions described in (c) (above) may be in a third Domain (e.g. Domain IIII) of a polypeptide such as an albumin, e.g. HSA.

[0184] The albumin variant or fragment thereof may further comprise an alteration (such as a substitution or insertion) at one more (several) positions corresponding to the following positions of SEQ ID No: 2:

[0185] (i) any of 417, 464, 492, 493, 494, 495, 496, 499, 500, 501, 503, 504, 505, 506, 510, 535, 536, 537, 538, 540, 550, 573, 574, 575, 577, 578, 579, 580, 581, 582, 584,

[0186] (ii) any of 34, 38, 40, 75, 76, 80, 82, 83, 86, 90, 91, 104, 113, 115, 116, 200, 461, 471, 496, 498, 501, 503, 504, 505, 506, 512, 514, 538, 550, 558, 559, 560, 562, 564, 565, 567, 573, 574, 577, 578, 579, 580, 581, 582, 584, 585 (particularly a substitution of one or more (several) of positions 34, 38, 40, 76, 80, 82, 83, 86, 104, 113, 115, 116, 471, 496, 498, 501, 503, 504, 505, 506, 512, 538, 550, 560, 562, 564, 565, 573, 574, 577, 578, 579, 580, 581, 582, 584, 585 from the native residue (e.g. non-Cys residue) to Cys and/or a deletion of or substitution of one or more (several) of positions 91, 200, 461, 514, 558, 559, 567 from Cys, to a non-Cys residue), and/or

[0187] (iii) any of 63, 82, 84, 87, 90, 106, 114, 119, 146, 464, 201, 494, 501, 503, 505, 510, 513, 518, 525, 529, 533, 535, 536, 537, 550, 550, 557, 560, 563, 565, 570, 573, 574, 574, 584 (particularly one or more of (several) D63N, E82K, E84K, D87N, L90P, K106E, R114G, E119K, V146E, H464A, H464N, C201F, D494N, E501K, E503K, E505K, H510A, I513N, D518N, K525E, E529K, V533M, H535A, K536E, I537N, D550G, D550A, V557M, K560E, D563N, E565K, E570K, K573E, K574N, K574E, K584E).

[0188] It is preferred that the parent albumin and/or the variant albumin comprises or consists of:

[0189] (a) a polypeptide having at least 60% sequence identity to the mature polypeptide of SEQ ID NO: 2;

[0190] (b) a polypeptide encoded by a polynucleotide that hybridizes under low stringency conditions with (i) the mature polypeptide coding sequence of SEQ ID NO: 1, or (ii) the full-length complement of (i);

[0191] c) a polypeptide encoded by a polynucleotide having at least 60% identity to the mature polypeptide coding sequence of SEQ ID NO: 1; and/or

[0192] (d) a fragment of the mature polypeptide of SEQ ID NO: 2.

[0193] Further preferences for the first aspect of the invention are provided below the thirteenth aspect of the invention. The skilled person understands that any aspect of the invention may be combined with another aspect or aspects of the invention and/or with one or more (several) of the preferences for the aspects of the invention and/or other disclosures made herein.

[0194] A second aspect of the invention relates to a method for obtaining a variant albumin or fragments thereof, or fusion polypeptides comprising the variant albumin or fragments thereof, or associates of variant albumin or fragment thereof comprising:

[0195] (a) introducing into a parent albumin or fragments thereof, or fusion polypeptides comprising the parent albumin or fragments thereof an alteration at one or more (several) positions corresponding to positions 30 to 41, 75 to 91, 104 to 120, 144 to 150, 186 to 201, 414 to 426, 457 to 472, 492 to 538, 550 to 585, 276, 410, and/or 411 of the mature polypeptide of SEQ ID NO: 2, wherein, it is preferred that, when the polypeptide comprises one or more (several) alterations selected from (i) the group consisting of positions 417, 464, 492, 493, 494, 495, 496, 499, 500, 501, 503, 504, 505, 506, 510, 535, 536, 537, 538, 540, 550, 573, 574, 575, 577, 578, 579, 580, 581, 582 and 584, and/or (ii) the group consisting of positions 34, 38, 40, 75, 76, 80, 82, 83, 86, 90, 91, 104, 113, 115, 116, 200, 461, 471, 496, 498, 501, 503, 504, 505, 506, 512, 514, 538, 550, 558, 559, 560, 562, 564, 565, 567, 573, 574, 577, 578, 579, 580, 581, 582, 584, 585 (particularly a substitution of one or more (several) of positions 34, 38, 40, 76, 80, 82, 83, 86, 104, 113, 115, 116, 471, 496, 498, 501, 503, 504, 505, 506, 512, 538, 550, 560, 562, 564, 565, 573, 574, 577, 578, 579, 580, 581, 582, 584, 585 from the native residue (e.g. non-Cys residue) to Cys and/or a deletion of or substitution of one or more (several) of positions 91, 200, 461, 514, 558, 559, 567 from Cys, to a non-Cys residue), and/or the group consisting of positions (iii) 63, 82, 84, 87, 90, 106, 114, 119, 146, 464, 201, 494, 501, 503, 505, 510, 513, 518, 525, 529, 533, 535, 536, 537, 550, 550, 557, 560, 563, 565, 570, 573, 574, 574, 584 (particularly one or more of (several) D63N, E82K, E84K, D87N, L90P, K106E, R114G, E119K, V146E, H464A, H464N, C201F, D494N, E501K, E503K, E505K, H510A, I513N, D518N, K525E, E529K, V533M, H535A, K536E, I537N, D550G, D550A, V557M, K560E, D563N, E565K, E570K, K573E, K574N, K574E, K584E); the polypeptide also comprises one or more (several) alterations at a position selected from group consisting of positions 30, 31, 32, 33, 34, 35, 36, 37, 38, 39, 40, 41, 75, 76, 77, 78, 79, 80, 81, 82, 83, 84, 85, 86, 87, 88, 89, 90, 91, 104, 105, 106, 107, 108, 109, 110, 111, 112, 113, 114, 115, 116, 117, 118, 119, 120, 144, 145, 146, 147, 148, 149, 150, 186, 187, 188, 189, 190, 191, 192, 193, 194, 195, 196, 197, 198, 199, 200, 201, 276, 410, 411, 414, 415, 416, 418, 419, 420, 421, 422, 423, 424, 425, 426, 457, 458, 459, 460, 461, 462, 463, 465, 466, 467, 468, 469, 470, 471, 472, 497, 498, 502, 507, 508, 509, 511, 512, 513, 514, 515, 516, 517, 518, 519, 520, 521, 522, 523, 524, 525, 526, 527, 528, 529, 530, 531, 532, 533, 534, 551, 552, 553, 554, 555, 556, 557, 558, 559, 560, 561, 562, 563, 564, 565, 567, 568, 569, 570, 571, 572, 576, 583, 585 and/or a stop codon inserted or substituted at a position selected from 497 to 585; and

[0196] (b) recovering the variant albumin or fragments thereof, or fusion polypeptides comprising the variant albumin or fragments thereof. T

[0197] Therefore, positions may be selected from one or more (several) of: 30, 31, 32, 33, 34, 35, 36, 37, 38, 39, 40, 41, 75, 76, 77, 78, 79, 80, 81, 82, 83, 84, 85, 86, 87, 88, 89, 90, 91, 104, 105, 106, 107, 108, 109, 110, 111, 112, 113, 114, 115, 116, 117, 118, 119, 120, 144, 145, 146, 147, 148, 149, 150, 186, 187, 188, 189, 190, 191, 192, 193, 194, 195, 196, 197, 198, 199, 200, 201, 276, 410, 411, 414, 415, 416, 417, 418, 419, 420, 421, 422, 423, 424, 425, 426, 457, 458, 459, 460, 461, 462, 463, 464, 465, 466, 467, 468, 469, 470, 471, 472, 492, 493, 494, 495, 496, 497, 498, 499, 500, 501, 502, 503, 504, 505, 506, 507, 508, 509, 510, 511, 512, 513, 514, 515, 516, 517, 518, 519, 520, 521, 522, 523, 524, 525, 526, 527, 528, 529, 530, 531, 532, 533, 534, 535, 536, 537, 538, 550, 551, 552, 553, 554, 555, 556, 557, 558, 559, 560, 561, 562, 563, 564, 565, 567, 568, 569, 570, 571, 572, 573, 574, 575, 576, 577, 578, 579, 580, 581, 582, 583, 584, 585.

[0198] Furthermore introduction of a stop codon may be made at any of positions 497 to 585, i.e. any of positions 497, 498, 499, 500, 501, 502, 503, 504, 505, 506, 507, 508, 509, 510, 511, 512, 513, 514, 515, 516, 517, 518, 519, 520, 521, 522, 523, 524, 525, 526, 527, 528, 529, 530, 531, 532, 533, 534, 535, 536, 537, 538, 539, 540, 541, 542, 543, 544, 545, 546, 547, 548, 549, 550, 551, 552, 553, 554, 555, 556, 557, 558, 559, 560, 561, 562, 563, 564, 565, 566, 567, 568, 569, 570, 571, 572, 573, 574, 575, 576, 577, 578, 579, 580, 581, 582, 583, 584, 585 (or equivalent position, relative to SEQ ID NO: 2). The introduction may be made by insertion or substitution. Introduction of such a stop codon may be in addition to or instead of an alteration described herein.

[0199] Therefore, the second aspect of the invention relates to a method for obtaining a variant albumin or fragments thereof, or fusion polypeptides comprising the variant albumin or fragments thereof, or associates of variant albumin or fragment thereof comprising:

[0200] (a) introducing into a parent albumin or fragments thereof, or fusion polypeptides comprising the parent albumin or fragments thereof an alteration at one or more (several) positions corresponding to positions albumin variant or fragment thereof having altered binding affinity to FcRn compared with a parent or reference albumin, comprising an alteration (such as a substitution, deletion or insertion) at:
[0201] (a) one or more (several) positions corresponding to the following positions of SEQ ID No: 2: any of 30, 31, 32, 33, 35, 36, 37, 39, 41, 77, 78, 79, 81, 84, 85, 87, 88, 89, 105, 106, 107, 108, 109, 110, 111, 112, 117, 118, 120, 144, 145, 146, 147, 148, 149, 150, 186, 187, 188, 189, 190, 191, 192, 193, 194, 195, 196, 197; and/or
[0202] (b) one or more (several) positions corresponding to the following positions of SEQ ID No: 2: any of 189, 190, 191, 192, 193, 194, 195, 196, 197, 198, 199; and/or
[0203] (c) one or more (several) positions corresponding to the following positions of SEQ ID No: 2: 414, 415, 416, 418, 419, 420, 421, 422, 423, 424, 425, 426, 457, 458, 459, 460, 462, 463, 465, 466, 467, 468, 469, 470, 472, 497, 498, 502, 507, 508, 509, 511, 515, 516, 517, 518, 519, 520, 521, 522, 523, 524, 525, 526, 527, 528, 529, 530, 531, 532, 534, 551, 552, 553, 554, 555, 556, 557, 561, 566, 568, 569, 570, 571, 572, 576, 583
   wherein the altered binding affinity of the variant or fragment thereof is relative to the binding affinity of a reference such as a parent albumin or fragment which does not comprise the alteration.

[0204] The positions described in (a) (above) may be in a first Domain (e.g. Domain I) of a polypeptide such as an albumin, e.g. HSA. The positions described in (b) (above) may be in a second Domain (e.g. Domain II) of a polypeptide such as an albumin, e.g. HSA. The positions described in (c) (above) may be in a third Domain (e.g. Domain IIII) of a polypeptide such as an albumin, e.g. HSA.

[0205] The albumin variant or fragment thereof may further comprise an alteration (such as a substitution or insertion) at one more (several) positions corresponding to the following positions of SEQ ID No: 2:

[0206] (i) any of 417, 464, 492, 493, 494, 495, 496, 499, 500, 501, 503, 504, 505, 506, 510, 535, 536, 537, 538, 540, 550, 573, 574, 575, 577, 578, 579, 580, 581, 582, 584,

[0207] (ii) any of 34, 38, 40, 75, 76, 80, 82, 83, 86, 90, 91, 104, 113, 115, 116, 200, 461, 471, 496, 498, 501, 503, 504, 505, 506, 512, 514, 538, 550, 558, 559, 560, 562, 564, 565, 567, 573, 574, 577, 578, 579, 580, 581, 582, 584, 585 (particularly a substitution of one or more (several) of positions 34, 38, 40, 76, 80, 82, 83, 86, 104, 113, 115, 116, 471, 496, 498, 501, 503, 504, 505, 506, 512, 538, 550, 560, 562, 564, 565, 573, 574, 577, 578, 579, 580, 581, 582, 584, 585 from the native residue (e.g. non-Cys residue) to Cys and/or a deletion of or substitution of one or more (several) of positions 91, 200, 461, 514, 558, 559, 567 from Cys, to a non-Cys residue), and/or

[0208] (iii) any of 63, 82, 84, 87, 90, 106, 114, 119, 146, 464, 201, 494, 501, 503, 505, 510, 513, 518, 525, 529, 533, 535, 536, 537, 550, 550, 557, 560, 563, 565, 570, 573, 574, 574, 584 (particularly one or more of (several) D63N, E82K, E84K, D87N, L90P, K106E, R114G, E119K, V146E, H464A, H464N, C201F, D494N, E501K, E503K, E505K, H510A, I513N, D518N, K525E, E529K, V533M, H535A, K536E, I537N, D550G, D550A, V557M, K560E, D563N, E565K, E570K, K573E, K574N, K574E, K584E).

[0209] It is preferred that the parent albumin and/or the variant albumin comprises or consists of:

[0210] (a) a polypeptide having at least 60% sequence identity to the mature polypeptide of SEQ ID NO: 2;

[0211] (b) a polypeptide encoded by a polynucleotide that hybridizes under low stringency conditions with (i) the mature polypeptide coding sequence of SEQ ID NO: 1, or (ii) the full-length complement of (i);

[0212] c) a polypeptide encoded by a polynucleotide having at least 60% identity to the mature polypeptide coding sequence of SEQ ID NO: 1; and/or

[0213] (d) a fragment of the mature polypeptide of SEQ ID NO: 2.

[0214] The variants can be prepared by those skilled persons using any mutagenesis procedure known in the art, such as site-directed mutagenesis, synthetic gene construction, semi-synthetic gene construction, random mutagenesis, shuffling, etc.

[0215] Site-directed mutagenesis is a technique in which one or more (several) mutations (alterations) are created at one or more (several) defined sites in a polynucleotide encoding the parent.

[0216] Site-directed mutagenesis can be accomplished in vitro by PCR involving the use of oligonucleotide primers containing the desired mutation. Site-directed mutagenesis can also be performed in vitro by cassette mutagenesis involving the cleavage by a restriction enzyme at a site in the plasmid comprising a polynucleotide encoding the parent and subsequent ligation of an oligonucleotide containing the mutation in the polynucleotide. Usually the restriction enzyme that digests at the plasmid and the oligonucleotide is the same, permitting ligation of the plasmid and insert to one another. See, e.g., Scherer and Davis, 1979, Proc. Natl. Acad. Sci. USA 76: 4949-4955; and Barton et al., 1990, Nucleic Acids Res. 18: 7349-4966.

[0217] Site-directed mutagenesis can also be accomplished in vivo by methods known in the art. See, e.g., U.S. Patent Application Publication NO: 2004/0171154; Storici et al., 2001, Nature Biotechnol. 19: 773-776; Kren et al., 1998, Nat. Med. 4: 285-290; and Calissano and Macino, 1996, Fungal Genet. Newslett. 43: 15-16.

[0218] Any site-directed mutagenesis procedure can be used in the invention. There are many commercial kits available that can be used to prepare variants.

[0219] Synthetic gene construction entails in vitro synthesis of a designed polynucleotide molecule to encode a polypeptide of interest. Gene synthesis can be performed utilizing a number of techniques, such as the multiplex microchip-based technology described by Tian et al. (2004, Nature 432: 1050-1054) and similar technologies wherein oligonucleotides are synthesized and assembled upon photo-programmable microfluidic chips.

[0220] Single or multiple amino acid substitutions, deletions, and/or insertions can be made and tested using known methods of mutagenesis, recombination, and/or shuffling, followed by a relevant screening procedure, such as those disclosed by Reidhaar-Olson and Sauer, 1988, Science 241: 53-57; Bowie and Sauer, 1989, Proc. Natl. Acad. Sci. USA 86: 2152-2156; WO 95/17413; or WO 95/22625. Other methods that can be used include error-prone PCR, phage display (e.g., Lowman et al., 1991, Biochemistry 30: 10832-10837; U.S. Pat. No. 5,223,409; WO 92/06204) and region-directed mutagenesis (Derbyshire et al., 1986, Gene 46: 145; Ner et al., 1988, DNA 7: 127).

[0221] Mutagenesis/shuffling methods can be combined with high-throughput, automated screening methods to detect activity of cloned, mutagenized polypeptides expressed by host cells (Ness et al., 1999, Nature Biotechnology 17: 893-896). Mutagenized DNA molecules that encode active polypeptides can be recovered from the host cells and rapidly sequenced using standard methods in the art. These methods allow the rapid determination of the importance of individual amino acid residues in a polypeptide.

[0222] Semi-synthetic gene construction is accomplished by combining aspects of synthetic gene construction, and/or site-directed mutagenesis, and/or random mutagenesis, and/or shuffling. Semi-synthetic construction is typified by a process utilizing polynucleotide fragments that are synthesized, in combination with PCR techniques. Defined regions of genes may thus be synthesized de novo, while other regions may be amplified using site-specific mutagenic primers, while yet other regions may be subjected to error-prone PCR or non-error prone PCR amplification. Polynucleotide sub sequences may then be shuffled.

[0223] Further preferences for the second aspect of the invention are provided below the thirteenth aspect of the invention.

### Variants

[0224] A third aspect of the invention provides variant albumins or fragments thereof, or fusion polypeptides comprising the variant albumin or fragments thereof, of a parent albumin, comprising an alteration at one or more (several) positions corresponding to positions 30 to 41, 75 to 91, 104 to 120, 144 to 150, 186 to 201, 414 to 426, 457 to 472, 492 to 538, 550 to 585, 276, 410 and/or 411 of the mature polypeptide of SEQ ID NO: 2, wherein, it is preferred that, when the polypeptide comprises one or more (several) alterations selected from (i) the group consisting of positions 417, 464, 492, 493, 494, 495, 496, 499, 500, 501, 503, 504, 505, 506, 510, 535, 536, 537, 538, 540, 550, 573, 574, 575, 577, 578, 579, 580, 581, 582 and 584, and/or (ii) the group consisting of positions 34, 38, 40, 75, 76, 80, 82, 83, 86, 90, 91, 104, 113, 115, 116, 200, 461, 471, 496, 498, 501, 503, 504, 505, 506, 512, 514, 538, 550, 558, 559, 560, 562, 564, 565, 567, 573, 574, 577, 578, 579, 580, 581, 582, 584, 585 (particularly a substitution of one or more (several) of positions 34, 38, 40, 76, 80, 82, 83, 86, 104, 113, 115, 116, 471, 496, 498, 501, 503, 504, 505, 506, 512, 538, 550, 560, 562, 564, 565, 573, 574, 577, 578, 579, 580, 581, 582, 584, 585 from the native residue (e.g. non-Cys residue) to Cys and/or a deletion of or substitution of one or more (several) of positions 91, 200, 461, 514, 558, 559, 567 from Cys, to a non-Cys residue), and/or the group consisting of positions (iii) 63, 82, 84, 87, 90, 106, 114, 119, 146, 464, 201, 494, 501, 503, 505, 510, 513, 518, 525, 529, 533, 535, 536, 537, 550, 550, 557, 560, 563, 565, 570, 573, 574, 574, 584 (particularly one or more of (several) D63N, E82K, E84K, D87N, L90P, K106E, R114G, E119K, V146E, H464A, H464N, C201F, D494N, E501K, E503K, E505K, H510A, I513N, D518N, K525E, E529K, V533M, H535A, K536E, I537N, D550G, D550A, V557M, K560E, D563N, E565K, E570K, K573E, K574N, K574E, K584E); the polypeptide also comprises one or more (several) alterations at a position selected from group consisting of positions 30, 31, 32, 33, 34, 35, 36, 37, 38, 39, 40, 41, 75, 76, 77, 78, 79, 80, 81, 82, 83, 84, 85, 86, 87, 88, 89, 90, 91, 104, 105, 106, 107, 108, 109, 110, 111, 112, 113, 114, 115, 116, 117, 118, 119, 120, 144, 145, 146, 147, 148, 149, 150, 186, 187, 188, 189, 190, 191, 192, 193, 194, 195, 196, 197, 198, 199, 200, 201, 276, 410, 411, 414, 415, 416, 418, 419, 420, 421, 422, 423, 424, 425, 426, 457, 458, 459, 460, 461, 462, 463, 465, 466, 467, 468, 469, 470, 471, 472, 497, 498, 502, 507, 508, 509, 511, 512, 513, 514, 515, 516, 517, 518, 519, 520, 521, 522, 523, 524, 525, 526, 527, 528, 529, 530, 531, 532, 533, 534, 551, 552, 553, 554, 555, 556, 557, 558, 559, 560, 561, 562, 563, 564, 565, 567, 568, 569, 570, 571, 572, 576, 583, 585 and/or a stop codon inserted or substituted at a position selected from 497 to 585.

[0225] Furthermore a stop codon may be introduced at any of positions 497 to 585. The introduction may be made by insertion or substitution. Introduction of such a stop codon may be in addition to or instead of a mutation described herein.

[0226] Therefore, the third aspect of the invention provides variant albumins or fragments thereof, or fusion polypeptides comprising the variant albumin or fragments thereof, of a parent albumin, comprising an alteration (such as a substitution, deletion or insertion) at:
[0227] (a) one or more (several) positions corresponding to the following positions of SEQ ID No: 2: any of 30, 31, 32, 33, 35, 36, 37, 39, 41, 77, 78, 79, 81, 84, 85, 87, 88, 89, 105, 106, 107, 108, 109, 110, 111, 112, 117, 118, 120, 144, 145, 146, 147, 148, 149, 150, 186, 187, 188, 189, 190, 191, 192, 193, 194, 195, 196, 197; and/or
[0228] (b) one or more (several) positions corresponding to the following positions of SEQ ID No: 2: any of 189, 190, 191, 192, 193, 194, 195, 196, 197, 198, 199; and/or
[0229] (c) one or more (several) positions corresponding to the following positions of SEQ ID No: 2: 414, 415, 416, 418, 419, 420, 421, 422, 423, 424, 425, 426, 457, 458, 459, 460, 462, 463, 465, 466, 467, 468, 469, 470, 472, 497, 498, 502, 507, 508, 509, 511, 515, 516, 517, 518, 519, 520, 521, 522, 523, 524, 525, 526, 527, 528, 529, 530, 531, 532, 534, 551, 552, 553, 554, 555, 556, 557, 561, 566, 568, 569, 570, 571, 572, 576, 583.

[0230] The positions described in (a) (above) may be in a first Domain (e.g. Domain I) of a polypeptide such as an albumin, e.g. HSA. The positions described in (b) (above) may be in a second Domain (e.g. Domain II) of a polypeptide such as an albumin, e.g. HSA. The positions described in (c) (above) may be in a third Domain (e.g. Domain IIII) of a polypeptide such as an albumin, e.g. HSA.

[0231] The albumin variant or fragment thereof may further comprise an alteration (such as a substitution or insertion) at one more (several) positions corresponding to the following positions of SEQ ID No: 2:

[0232] (i) any of 417, 464, 492, 493, 494, 495, 496, 499, 500, 501, 503, 504, 505, 506, 510, 535, 536, 537, 538, 540, 550, 573, 574, 575, 577, 578, 579, 580, 581, 582, 584,

[0233] (ii) any of 34, 38, 40, 75, 76, 80, 82, 83, 86, 90, 91, 104, 113, 115, 116, 200, 461, 471, 496, 498, 501, 503, 504, 505, 506, 512, 514, 538, 550, 558, 559, 560, 562, 564, 565, 567, 573, 574, 577, 578, 579, 580, 581, 582, 584, 585 (particularly a substitution of one or more (several) of positions 34, 38, 40, 76, 80, 82, 83, 86, 104, 113, 115, 116, 471, 496, 498, 501, 503, 504, 505, 506, 512, 538, 550, 560, 562, 564, 565, 573, 574, 577, 578, 579, 580, 581, 582, 584, 585 from the native residue (e.g. non-Cys residue) to Cys and/or a deletion of or substitution of one or more (several) of positions 91, 200, 461, 514, 558, 559, 567 from Cys, to a non-Cys residue), and/or

[0234] (iii) any of 63, 82, 84, 87, 90, 106, 114, 119, 146, 464, 201, 494, 501, 503, 505, 510, 513, 518, 525, 529, 533, 535, 536, 537, 550, 550, 557, 560, 563, 565, 570, 573, 574, 574, 584 (particularly one or more of (several) D63N, E82K, E84K, D87N, L90P, K106E, R114G, E119K, V146E, H464A, H464N, C201F, D494N, E501K, E503K, E505K, H510A, I513N, D518N, K525E, E529K, V533M, H535A, K536E, I537N, D550G, D550A, V557M, K560E, D563N, E565K, E570K, K573E, K574N, K574E, K584E).

[0235] It is preferred that the parent albumin and/or the variant albumin comprises or consists of:

[0236] (a) a polypeptide having at least 60% sequence identity to the mature polypeptide of SEQ ID NO: 2;

[0237] (b) a polypeptide encoded by a polynucleotide that hybridizes under low stringency conditions with (i) the mature polypeptide coding sequence of SEQ ID NO: 1, or (ii) the full-length complement of (i);

[0238] c) a polypeptide encoded by a polynucleotide having at least 60% identity to the mature polypeptide coding sequence of SEQ ID NO: 1; and/or

[0239] (d) a fragment of the mature polypeptide of SEQ ID NO: 2.

[0240] The variant albumin, a fragment thereof, or albumin part of a fusion polypeptide comprising variant albumin or a fragment thereof according to the invention has generally a sequence identity the sequence of HSA shown in SEQ ID NO: 2 of at least 60%, preferably at least 70%, preferably at least 80%, preferably at least 85%, preferably at least 90%, more preferred at least 95%, more preferred at least 96%, more preferred at least 97%, more preferred at least 98% and most preferred at least 99%.

[0241] In one aspect, the number of alterations in the variants of the invention is 1-20, e.g., 1-10 and 1-5, such as 1, 2, 3, 4, 5, 6, 7, 8, 9 or 10 alterations.

[0242] The variant albumin, a fragment thereof or fusion polypeptide comprising the variant albumin or fragment thereof has altered binding affinity to FcRn and/or an altered plasma half-life compared with the corresponding parent or reference albumin, fragment thereof, or fusion polypeptide comprising the variant albumin or fragment thereof and/or an altered binding affinity to FcRn.

[0243] In a particular preferred embodiment the parent or reference albumin is HSA and the variant albumin, a fragment thereof or fusion polypeptide comprising the variant albumin or fragment thereof has altered binding affinity to FcRn and/or an altered plasma half-life compared with the HSA, the corresponding fragment or fusion polypeptide comprising HSA or fragment thereof and/or an altered binding affinity to FcRn.

[0244] The correlation between binding of albumin to its receptor and plasma half-life has been realized by the present inventors based on the natural occurring allele of HSA D494N. The inventors have previously analyzed this allele and found that it has a lower affinity to its receptor FcRn than the affinity of WT HSA to FcRn.

[0245] Further, it has been disclosed that a transgenic mouse having the natural mouse FcRn replaced with human FcRn has a higher serum albumin level than normal mouse (J Exp Med. (2003) 197(3):315-22). The inventors have previously discovered that human FcRn has a higher affinity to mouse serum albumin than mouse FcRn has to mouse serum albumin and, therefore, the observed increase in serum albumin in the transgenic mice corresponds with a higher affinity between serum albumin and its receptor, confirming the correlation between albumin binding to FcRn and plasma half-life. In addition, variants of albumin that have little or no binding to FcRn have been shown to have reduced half-life in a mouse model, Kenanova et al (2009) J. Nucl. Med.; 50 (Supplement 2):1582).

[0246] One way to determine whether the affinity of a variant albumin to FcRn is higher or lower than the parent or reference albumin is to use the Surface Plasmon Resonance assay (SPR) as described below. The skilled person will understand that other methods might be useful to determine whether the affinity of a variant albumin to FcRn is higher or lower than the affinity of the parent or reference albumin to FcRn, e.g., determination and comparison of the binding constants KD. Thus, according to the invention variant albumins having a KD that is lower than the KD for natural HSA is considered to have a higher plasma half-life than HSA and variant albumins having a KD that is higher than the KD for natural HSA is considered to have a lower plasma half-life than HSA.

[0247] The variants of albumin or fragments thereof or fusion polypeptides comprising albumin or fragments thereof comprise one or more (several) alterations, such as substitutions, deletions or insertions at one or more (several) positions corresponding to the positions in HSA selected from the group consisting of 30 to 41, 75 to 91, 104 to 120, 144 to 150, 186 to 201, 414 to 426, 457 to 472, 492 to 538, 550 to 585, 276, 410 and/or 411 of the mature polypeptide of SEQ ID NO: 2 and/or introduction of a stop codon may be made at any of positions 497 to 585 of the mature polypeptide of SEQ ID NO: 2, wherein, it is preferred that, when the polypeptide comprises one or more (several) alterations selected from (i) the group consisting of positions 417, 464, 492, 493, 494, 495, 496, 499, 500, 501, 503, 504, 505, 506, 510, 535, 536, 537, 538, 540, 550, 573, 574, 575, 577, 578, 579, 580, 581, 582 and 584, (ii) the group consisting of positions 34, 38, 40, 75, 76, 80, 82, 83, 86, 90, 91, 104, 113, 115, 116, 200, 461, 471, 496, 498, 501, 503, 504, 505, 506, 512, 514, 538, 550, 558, 559, 560, 562, 564, 565, 567, 573, 574, 577, 578, 579, 580, 581, 582, 584, 585 (particularly a substitution of one or more (several) of positions 34, 38, 40, 76, 80, 82, 83, 86, 104, 113, 115, 116, 471, 496, 498, 501, 503, 504, 505, 506, 512, 538, 550, 560, 562, 564, 565, 573, 574, 577, 578, 579, 580, 581, 582, 584, 585 from the native residue (e.g. non-Cys residue) to Cys and/or a deletion of or substitution of one or more (several) of positions 91, 200, 461, 514, 558, 559, 567 from Cys, to a non-Cys residue), or the group consisting of positions (iii) 63, 82, 84, 87, 90, 106, 114, 119, 146, 464, 201, 494, 501, 503, 505, 510, 513, 518, 525, 529, 533, 535, 536, 537, 550, 550, 557, 560, 563, 565, 570, 573, 574, 574, 584 (particularly one or more of (several) D63N, E82K, E84K, D87N, L90P, K106E, R114G, E119K, V146E, H464A, H464N, C201F, D494N, E501K, E503K, E505K, H510A, I513N, D518N, K525E, E529K, V533M, H535A, K536E, I537N, D550G, D550A, V557M, K560E, D563N, E565K, E570K, K573E, K574N, K574E, K584E); the polypeptide also comprises one or more (several) alterations at a position selected from group consisting of positions 30, 31, 32, 33, 34, 35, 36, 37, 38, 39, 40, 41, 75, 76, 77, 78, 79, 80, 81, 82, 83, 84, 85, 86, 87, 88, 89, 90, 91, 104, 105, 106, 107, 108, 109, 110, 111, 112, 113, 114, 115, 116, 117, 118, 119, 120, 144, 145, 146, 147, 148, 149, 150, 186, 187, 188, 189, 190, 191, 192, 193, 194, 195, 196, 197, 198, 199, 200, 201, 276, 410, 411, 414, 415, 416, 418, 419, 420, 421, 422, 423, 424, 425, 426, 457, 458, 459, 460, 461, 462, 463, 465, 466, 467, 468, 469, 470, 471, 472, 497, 498, 502, 507, 508, 509, 511, 512, 513, 514, 515, 516, 517, 518, 519, 520, 521, 522, 523, 524, 525, 526, 527, 528, 529, 530, 531, 532, 533, 534, 551, 552, 553, 554, 555, 556, 557, 558, 559, 560, 561, 562, 563, 564, 565, 567, 568, 569, 570, 571, 572, 576, 583, 585 and/or a stop codon inserted or substituted at a position selected from 497 to 585. The introduction may be made by insertion or substitution. Introduction of such a stop codon may be in addition to or instead of an alteration described herein. The substitution may be any substitution where the amino acid in the natural albumin sequence is substituted with a different amino acid selected among the remaining 19 natural occurring amino acids.

[0248] In one aspect, a variant comprises an alteration at one or more (several) positions corresponding to positions 30 to 41, 75 to 91, 104 to 120, 144 to 150, 186 to 201, 414 to 426, 457 to 472, 492 to 538, 550 to 585, 276, 410 and/or 411 of the mature polypeptide of SEQ ID NO: 2, wherein, it is preferred that, when the polypeptide comprises one or more (several) alterations selected from (i) the group consisting of positions 417, 464, 492, 493, 494, 495, 496, 499, 500, 501, 503, 504, 505, 506, 510, 535, 536, 537, 538, 540, 550, 573, 574, 575, 577, 578, 579, 580, 581, 582 and 584, (ii) the group consisting of positions 34, 38, 40, 75, 76, 80, 82, 83, 86, 90, 91, 104, 113, 115, 116, 200, 461, 471, 496, 498, 501, 503, 504, 505, 506, 512, 514, 538, 550, 558, 559, 560, 562, 564, 565, 567, 573, 574, 577, 578, 579, 580, 581, 582, 584, 585 (particularly a substitution of one or more (several) of positions 34, 38, 40, 76, 80, 82, 83, 86, 104, 113, 115, 116, 471, 496, 498, 501, 503, 504, 505, 506, 512, 538, 550, 560, 562, 564, 565, 573, 574, 577, 578, 579, 580, 581, 582, 584, 585 from the native residue (e.g. non-Cys residue) to Cys and/or a deletion of or substitution of one or more (several) of positions 91, 200, 461, 514, 558, 559, 567 from Cys, to a non-Cys residue), or the group consisting of positions (iii) 63, 82, 84, 87, 90, 106, 114, 119, 146, 464, 201, 494, 501, 503, 505, 510, 513, 518, 525, 529, 533, 535, 536, 537, 550, 550, 557, 560, 563, 565, 570, 573, 574, 574, 584 (particularly one or more of (several) D63N, E82K, E84K, D87N, L90P, K106E, R114G, E119K, V146E, H464A, H464N, C201F, D494N, E501K, E503K, E505K, H510A, I513N, D518N, K525E, E529K, V533M, H535A, K536E, I537N, D550G, D550A, V557M, K560E, D563N, E565K, E570K, K573E, K574N, K574E, K584E); the polypeptide also comprises one or more (several) alterations at a position selected from group consisting of positions 30, 31, 32, 33, 34, 35, 36, 37, 38, 39, 40, 41, 75, 76, 77, 78, 79, 80, 81, 82, 83, 84, 85, 86, 87, 88, 89, 90, 91, 104, 105, 106, 107, 108, 109, 110, 111, 112, 113, 114, 115, 116, 117, 118, 119, 120, 144, 145, 146, 147, 148, 149, 150, 186, 187, 188, 189, 190, 191, 192, 193, 194, 195, 196, 197, 198, 199, 200, 201, 276, 410, 411, 414, 415, 416, 418, 419, 420, 421, 422, 423, 424, 425, 426, 457, 458, 459, 460, 461, 462, 463, 465, 466, 467, 468, 469, 470, 471, 472, 497, 498, 502, 507, 508, 509, 511, 512, 513, 514, 515, 516, 517, 518, 519, 520, 521, 522, 523, 524, 525, 526, 527, 528, 529, 530, 531, 532, 533, 534, 551, 552, 553, 554, 555, 556, 557, 558, 559, 560, 561, 562, 563, 564, 565, 567, 568, 569, 570, 571, 572, 576, 583, 585 and/or a stop codon inserted or substituted at a position selected from 497 to 585.

In another aspect, a variant comprises an alteration at two or more (several) positions corresponding to any of 30 to 41, 75 to 91, 104 to 120, 144 to 150, 186 to 201, 414 to 426, 457 to 472, 492 to 538, 550 to 585, and/or 276, 410, 411 of the mature polypeptide of SEQ ID NO: 2, wherein, it is preferred that, when the variant, fragment or fusion thereof comprises one or more (several) substitutions at positions 417, 464, 492, 493, 494, 495, 496, 499, 500, 501, 503, 504, 505, 506, 510, 535, 536, 537, 538, 540, 550, 573, 574, 575, 577, 578, 579, 580, 581, 582 and 584 the variant, fragment or fusion thereof also comprises one or more (several) substitutions at a position selected from group consisting of 30, 31, 32, 33, 34, 35, 36, 37, 38, 39, 40, 41, 75, 76, 77, 78, 79, 80, 81, 82, 83, 84, 85, 86, 87, 88, 89, 90, 91, 104, 105, 106, 107, 108, 109, 110, 111, 112, 113, 114, 115, 116, 117, 118, 119, 120, 144, 145, 146, 147, 148, 149, 150, 186, 187, 188, 189, 190, 191, 192, 193, 194, 195, 196, 197, 198, 199, 200, 201, 276, 410, 411, 414, 415, 416, 418, 419, 420, 421, 422, 423, 424, 425, 426, 457, 458, 459, 460, 461, 462, 463, 465, 466, 467, 468, 469, 470, 471, 472, 497, 498, 502, 507, 508, 509, 511, 512, 513, 514, 515, 516, 517, 518, 519, 520, 521, 522, 523, 524, 525, 526, 527, 528, 529, 530, 531, 532, 533, 534, 551, 552, 553, 554, 555, 556, 557, 558, 559, 560, 561, 562, 563, 564, 565, 567, 568, 569, 570, 571, 572, 576, 583, 585 and/or a stop codon inserted or substituted at a position selected from 497 to 585. It is also preferred that when the polypeptide comprises one or more (several) alterations selected from (i) the group consisting of positions 417, 464, 492, 493, 494, 495, 496, 499, 500, 501, 503, 504, 505, 506, 510, 535, 536, 537, 538, 540, 550, 573, 574, 575, 577, 578, 579, 580, 581, 582 and 584, (ii) the group consisting of positions 34, 38, 40, 75, 76, 80, 82, 83, 86, 90, 91, 104, 113, 115, 116, 200, 461, 471, 496, 498, 501, 503, 504, 505, 506, 512, 514, 538, 550, 558, 559, 560, 562, 564, 565, 567, 573, 574, 577, 578, 579, 580, 581, 582, 584, 585 (particularly a substitution of one or more (several) of positions 34, 38, 40, 76, 80, 82, 83, 86, 104, 113, 115, 116, 471, 496, 498, 501, 503, 504, 505, 506, 512, 538, 550, 560, 562, 564, 565, 573, 574, 577, 578, 579, 580, 581, 582, 584, 585 from the native residue (e.g. non-Cys residue) to Cys and/or a deletion of or substitution of one or more (several) of positions 91, 200, 461, 514, 558, 559, 567 from Cys, to a non-Cys residue), or the group consisting of positions (iii) 63, 82, 84, 87, 90, 106, 114, 119, 146, 464, 201, 494, 501, 503, 505, 510, 513, 518, 525, 529, 533, 535, 536, 537, 550, 550, 557, 560, 563, 565, 570, 573, 574, 574, 584 (particularly one or more of (several) D63N, E82K, E84K, D87N, L90P, K106E, R114G, E119K, V146E, H464A, H464N, C201F, D494N, E501K, E503K, E505K, H510A, I513N, D518N, K525E, E529K, V533M, H535A, K536E, I537N, D550G, D550A, V557M, K560E, D563N, E565K, E570K, K573E, K574N, K574E, K584E); the polypeptide also comprises one or more (several) alterations at a position selected from group consisting of positions 30, 31, 32, 33, 34, 35, 36, 37, 38, 39, 40, 41, 75, 76, 77, 78, 79, 80, 81, 82, 83, 84, 85, 86, 87, 88, 89, 90, 91, 104, 105, 106, 107, 108, 109, 110, 111, 112, 113, 114, 115, 116, 117, 118, 119, 120, 144, 145, 146, 147, 148, 149, 150, 186, 187, 188, 189, 190, 191, 192, 193, 194, 195, 196, 197, 198, 199, 200, 201, 276, 410, 411, 414, 415, 416, 418, 419, 420, 421, 422, 423, 424, 425, 426, 457, 458, 459, 460, 461, 462, 463, 465, 466, 467, 468, 469, 470, 471, 472, 497, 498, 502, 507, 508, 509, 511, 512, 513, 514, 515, 516, 517, 518, 519, 520, 521, 522, 523, 524, 525, 526, 527, 528, 529, 530, 531, 532, 533, 534, 551, 552, 553, 554, 555, 556, 557, 558, 559, 560, 561, 562, 563, 564, 565, 567, 568, 569, 570, 571, 572, 576, 583, 585 and/or a stop codon inserted or substituted at a position selected from 497 to 585.
In another aspect, a variant comprises an alteration at three positions corresponding to any of positions 30 to 41, 75 to 91, 104 to 120, 144 to 150, 186 to 201, 414 to 426, 457 to 472, 492 to 538, 550 to 585, 276, 410, and/or 411 of the mature polypeptide of SEQ ID NO: 2, wherein, it is preferred that, when the polypeptide comprises one or more (several) alterations selected from (i) the group consisting of positions 417, 464, 492, 493, 494, 495, 496, 499, 500, 501, 503, 504, 505, 506, 510, 535, 536, 537, 538, 540, 550, 573, 574, 575, 577, 578, 579, 580, 581, 582 and 584, (ii) the group consisting of positions 34, 38, 40, 75, 76, 80, 82, 83, 86, 90, 91, 104, 113, 115, 116, 200, 461, 471, 496, 498, 501, 503, 504, 505, 506, 512, 514, 538, 550, 558, 559, 560, 562, 564, 565, 567, 573, 574, 577, 578, 579, 580, 581, 582, 584, 585 (particularly a substitution of one or more (several) of positions 34, 38, 40, 76, 80, 82, 83, 86, 104, 113, 115, 116, 471, 496, 498, 501, 503, 504, 505, 506, 512, 538, 550, 560, 562, 564, 565, 573, 574, 577, 578, 579, 580, 581, 582, 584, 585 from the native residue (e.g. non-Cys residue) to Cys and/or a deletion of or substitution of one or more (several) of positions 91, 200, 461, 514, 558, 559, 567 from Cys, to a non-Cys residue), or the group consisting of positions (iii) 63, 82, 84, 87, 90, 106, 114, 119, 146, 464, 201, 494, 501, 503, 505, 510, 513, 518, 525, 529, 533, 535, 536, 537, 550, 550, 557, 560, 563, 565, 570, 573, 574, 574, 584 (particularly one or more of (several) D63N, E82K, E84K, D87N, L90P, K106E, R114G, E119K, V146E, H464A, H464N, C201F, D494N, E501K, E503K, E505K, H510A, I513N, D518N, K525E, E529K, V533M, H535A, K536E, I537N, D550G, D550A, V557M, K560E, D563N, E565K, E570K, K573E, K574N, K574E, K584E); the polypeptide also comprises one or more (several) alterations at a position selected from group consisting of positions 30, 31, 32, 33, 34, 35, 36, 37, 38, 39, 40, 41, 75, 76, 77, 78, 79, 80, 81, 82, 83, 84, 85, 86, 87, 88, 89, 90, 91, 104, 105, 106, 107, 108, 109, 110, 111, 112, 113, 114, 115, 116, 117, 118, 119, 120, 144, 145, 146, 147, 148, 149, 150, 186, 187, 188, 189, 190, 191, 192, 193, 194, 195, 196, 197, 198, 199, 200, 201, 276, 410, 411, 414, 415, 416, 418, 419, 420, 421, 422, 423, 424, 425, 426, 457, 458, 459, 460, 461, 462, 463, 465, 466, 467, 468, 469, 470, 471, 472, 497, 498, 502, 507, 508, 509, 511, 512, 513, 514, 515, 516, 517, 518, 519, 520, 521, 522, 523, 524, 525, 526, 527, 528, 529, 530, 531, 532, 533, 534, 551, 552, 553, 554, 555, 556, 557, 558, 559, 560, 561, 562, 563, 564, 565, 567, 568, 569, 570, 571, 572, 576, 583, 585 and/or a stop codon inserted or substituted at a position selected from 497 to 585 and/or a stop codon inserted or substituted at a position selected from 497 to 585.

[0249] Possible insertions and substitutions for each of the mentioned positions are provided in Table 2 below.

TABLE 2
Possible and preferred alterations of a parent albumin, positions are relative to SEQ ID NO: 2,
however the invention also includes equivalent positions in sequences other than SEQ ID No: 2.

| AA | | | |
|---|---|---|---|
| No. | AA | Substitution | Insertion |
| 30 | Y | A, C, D, E, F, G, H, I, K, L, M, N, P, Q, R, S, T, V, W | A, C, D, E, F, G, H, I, K, L, M, N, P, Q, R, S, T, V, W, Y |
| 31 | L | A, C, D, E, F, G, H, I, K, M, N, P, Q, R, S, T, V, W, Y | A, C, D, E, F, G, H, I, K, L, M, N, P, Q, R, S, T, V, W, Y |
| 32 | Q | A, C, D, E, F, G, H, I, K, L, M, N, P, R, S, T, V, W, Y | A, C, D, E, F, G, H, I, K, L, M, N, P, Q, R, S, T, V, W, Y |
| 33 | Q | A, C, D, E, F, G, H, I, K, L, M, N, P, R, S, T, V, W, Y | A, C, D, E, F, G, H, I, K, L, M, N, P, Q, R, S, T, V, W, Y |
| 34 | C | A, D, E, F, G, H, I, K, L, M, N, P, Q, R, S, T, V, W, Y | A, C, D, E, F, G, H, I, K, L, M, N, P, Q, R, S, T, V, W, Y |
| 35 | P | A, C, D, E, F, G, H, I, K, L, M, N, Q, R, S, T, V, W, Y | A, C, D, E, F, G, H, I, K, L, M, N, P, Q, R, S, T, V, W, Y |
| 36 | F | A, C, D, E, G, H, I, K, L, M, N, P, Q, R, S, T, V, W, Y | A, C, D, E, F, G, H, I, K, L, M, N, P, Q, R, S, T, V, W, Y |
| 37 | E | A, C, D, F, G, H, I, K, L, M, N, P, Q, R, S, T, V, W, Y | A, C, D, E, F, G, H, I, K, L, M, N, P, Q, R, S, T, V, W, Y |
| 38 | D | A, C, E, F, G, H, I, K, L, M, N, P, Q, R, S, T, V, W, Y | A, C, D, E, F, G, H, I, K, L, M, N, P, Q, R, S, T, V, W, Y |
| 39 | H | A, C, D, E, F, G, I, K, L, M, N, P, Q, R, S, T, V, W, Y | A, C, D, E, F, G, H, I, K, L, M, N, P, Q, R, S, T, V, W, Y |
| 40 | V | A, C, D, E, F, G, H, I, K, L, M, N, P, Q, R, S, T, W, Y | A, C, D, E, F, G, H, I, K, L, M, N, P, Q, R, S, T, V, W, Y |
| 41 | K | A, C, D, E, F, G, H, I, L, M, N, P, Q, R, S, T, V, W, Y | A, C, D, E, F, G, H, I, K, L, M, N, P, Q, R, S, T, V, W, Y |
| 75 | C | A, D, E, F, G, H, I, K, L, M, N, P, Q, R, S, T, V, W, Y | A, C, D, E, F, G, H, I, K, L, M, N, P, Q, R, S, T, V, W, Y |
| 76 | T | A, C, D, E, F, G, H, I, K, L, M, N, P, Q, R, S, V, W, Y | A, C, D, E, F, G, H, I, K, L, M, N, P, Q, R, S, T, V, W, Y |
| 77 | V | A, C, D, E, F, G, H, I, K, L, M, N, P, Q, R, S, T, W, Y | A, C, D, E, F, G, H, I, K, L, M, N, P, Q, R, S, T, V, W, Y |
| 78 | A | C, D, E, F, G, H, I, K, L, M, N, P, Q, R, S, T, V, W, Y | A, C, D, E, F, G, H, I, K, L, M, N, P, Q, R, S, T, V, W, Y |
| 79 | T | A, C, D, E, F, G, H, I, K, L, M, N, P, Q, R, S, V, W, Y | A, C, D, E, F, G, H, I, K, L, M, N, P, Q, R, S, T, V, W, Y |
| 80 | L | A, C, D, E, F, G, H, I, K, M, N, P, Q, R, S, T, V, W, Y | A, C, D, E, F, G, H, I, K, L, M, N, P, Q, R, S, T, V, W, Y |
| 81 | R | A, C, D, E, F, G, H, I, K, L, M, N, P, Q, S, T, V, W, Y | A, C, D, E, F, G, H, I, K, L, M, N, P, Q, R, S, T, V, W, Y |
| 82 | E | A, C, D, E, F, G, H, I, K, L, M, N, P, Q, S, T, V, W, Y | A, C, D, E, F, G, H, I, K, L, M, N, P, Q, R, S, T, V, W, Y |
| 83 | T | A, C, D, E, F, G, H, I, K, L, M, N, P, Q, R, S, V, W, Y | A, C, D, E, F, G, H, I, K, L, M, N, P, Q, R, S, T, V, W, Y |
| 84 | Y | A, C, D, E, F, G, H, I, K, L, M, N, P, Q, R, S, T, V, W | A, C, D, E, F, G, H, I, K, L, M, N, P, Q, R, S, T, V, W, Y |
| 85 | G | A, C, D, E, F, H, I, K, L, M, N, P, Q, R, S, T, V, W, Y | A, C, D, E, F, G, H, I, K, L, M, N, P, Q, R, S, T, V, W, Y |
| 86 | E | A, C, D, E, F, G, H, I, K, L, M, N, P, Q, S, T, V, W, Y | A, C, D, E, F, G, H, I, K, L, M, N, P, Q, R, S, T, V, W, Y |
| 87 | M | A, C, D, E, F, G, H, I, K, L, N, P, Q, R, S, T, V, W, Y | A, C, D, E, F, G, H, I, K, L, M, N, P, Q, R, S, T, V, W, Y |
| 88 | A | C, D, E, F, G, H, I, K, L, M, N, P, Q, R, S, T, V, W, Y | A, C, D, E, F, G, H, I, K, L, M, N, P, Q, R, S, T, V, W, Y |
| 89 | D | A, C, E, F, G, H, I, K, L, M, N, P, Q, R, S, T, V, W, Y | A, C, D, E, F, G, H, I, K, L, M, N, P, Q, R, S, T, V, W, Y |
| 90 | C | A, D, E, F, G, H, I, K, L, M, N, P, Q, R, S, T, V, W, Y | A, C, D, E, F, G, H, I, K, L, M, N, P, Q, R, S, T, V, W, Y |
| 91 | C | A, D, E, F, G, H, I, K, L, M, N, P, Q, R, S, T, V, W, Y | A, C, D, E, F, G, H, I, K, L, M, N, P, Q, R, S, T, V, W, Y |
| 104 | Q | A, C, D, E, F, G, H, I, K, L, M, N, P, R, S, T, V, W, Y | A, C, D, E, F, G, H, I, K, L, M, N, P, Q, R, S, T, V, W, Y |
| 105 | H | A, C, D, E, F, G, I, K, L, M, N, P, Q, R, S, T, V, W, Y | A, C, D, E, F, G, H, I, K, L, M, N, P, Q, R, S, T, V, W, Y |
| 106 | K | A, C, D, E, F, G, H, I, L, M, N, P, Q, R, S, T, V, W, Y | A, C, D, E, F, G, H, I, K, L, M, N, P, Q, R, S, T, V, W, Y |
| 107 | D | A, C, E, F, G, H, I, K, L, M, N, P, Q, R, S, T, V, W, Y | A, C, D, E, F, G, H, I, K, L, M, N, P, Q, R, S, T, V, W, Y |
| 108 | D | A, C, E, F, G, H, I, K, L, M, N, P, Q, R, S, T, V, W, Y | A, C, D, E, F, G, H, I, K, L, M, N, P, Q, R, S, T, V, W, Y |
| 109 | N | A, C, D, E, F, G, H, I, K, L, M, P, Q, R, S, T, V, W, Y | A, C, D, E, F, G, H, I, K, L, M, N, P, Q, R, S, T, V, W, Y |
| 110 | P | A, C, D, E, F, G, H, I, K, L, M, N, Q, R, S, T, V, W, Y | A, C, D, E, F, G, H, I, K, L, M, N, P, Q, R, S, T, V, W, Y |
| 111 | N | A, C, D, E, F, G, H, I, K, L, M, P, Q, R, S, T, V, W, Y | A, C, D, E, F, G, H, I, K, L, M, N, P, Q, R, S, T, V, W, Y |
| 112 | L | A, C, D, E, F, G, H, I, K, M, N, P, Q, R, S, T, V, W, Y | A, C, D, E, F, G, H, I, K, L, M, N, P, Q, R, S, T, V, W, Y |
| 113 | P | A, C, D, E, F, G, H, I, K, L, M, N, Q, R, S, T, V, W, Y | A, C, D, E, F, G, H, I, K, L, M, N, P, Q, R, S, T, V, W, Y |
| 114 | R | A, C, D, E, F, G, H, I, K, L, M, N, P, Q, S, T, V, W, Y | A, C, D, E, F, G, H, I, K, L, M, N, P, Q, R, S, T, V, W, Y |
| 115 | L | A, C, D, E, F, G, H, I, K, M, N, P, Q, R, S, T, V, W, Y | A, C, D, E, F, G, H, I, K, L, M, N, P, Q, R, S, T, V, W, Y |
| 116 | V | A, C, D, E, F, G, H, I, K, L, M, N, P, Q, R, S, T, W, Y | A, C, D, E, F, G, H, I, K, L, M, N, P, Q, R, S, T, V, W, Y |
| 117 | R | A, C, D, E, F, G, H, I, K, L, M, N, P, Q, S, T, V, W, Y | A, C, D, E, F, G, H, I, K, L, M, N, P, Q, R, S, T, V, W, Y |
| 118 | P | A, C, D, E, F, G, H, I, K, L, M, N, Q, R, S, T, V, W, Y | A, C, D, E, F, G, H, I, K, L, M, N, P, Q, R, S, T, V, W, Y |
| 119 | E | A, C, D, F, G, H, I, K, L, M, N, P, Q, R, S, T, V, W, Y | A, C, D, E, F, G, H, I, K, L, M, N, P, Q, R, S, T, V, W, Y |
| 120 | V | A, C, D, E, F, G, H, I, K, L, M, N, P, Q, R, S, T, W, Y | A, C, D, E, F, G, H, I, K, L, M, N, P, Q, R, S, T, V, W, Y |
| 144 | R | A, C, D, E, F, G, H, I, K, L, M, N, P, Q, S, T, V, W, Y | A, C, D, E, F, G, H, I, K, L, M, N, P, Q, R, S, T, V, W, Y |
| 145 | R | A, C, D, E, F, G, H, I, K, L, M, N, P, Q, S, T, V, W, Y | A, C, D, E, F, G, H, I, K, L, M, N, P, Q, R, S, T, V, W, Y |
| 146 | H | A, C, D, E, F, G, I, K, L, M, N, P, Q, R, S, T, V, W, Y | A, C, D, E, F, G, H, I, K, L, M, N, P, Q, R, S, T, V, W, Y |
| 147 | P | A, C, D, E, F, G, H, I, K, L, M, N, Q, R, S, T, V, W, Y | A, C, D, E, F, G, H, I, K, L, M, N, P, Q, R, S, T, V, W, Y |
| 148 | Y | A, C, D, E, F, G, H, I, K, L, M, N, P, Q, R, S, T, V, W | A, C, D, E, F, G, H, I, K, L, M, N, P, Q, R, S, T, V, W, Y |
| 149 | F | A, C, D, E, G, H, I, K, L, M, N, P, Q, R, S, T, V, W, Y | A, C, D, E, F, G, H, I, K, L, M, N, P, Q, R, S, T, V, W, Y |
| 150 | Y | A, C, D, E, F, G, H, I, K, L, M, N, P, Q, R, S, T, V, W | A, C, D, E, F, G, H, I, K, L, M, N, P, Q, R, S, T, V, W, Y |
| 186 | R | A, C, D, E, F, G, H, I, K, L, M, N, P, Q, S, T, V, W, Y | A, C, D, E, F, G, H, I, K, L, M, N, P, Q, R, S, T, V, W, Y |
| 187 | D | A, C, E, F, G, H, I, K, L, M, N, P, Q, R, S, T, V, W, Y | A, C, D, E, F, G, H, I, K, L, M, N, P, Q, R, S, T, V, W, Y |
| 188 | E | A, C, D, F, G, H, I, K, L, M, N, P, Q, R, S, T, V, W, Y | A, C, D, E, F, G, H, I, K, L, M, N, P, Q, R, S, T, V, W, Y |
| 189 | G | A, C, D, E, F, H, I, K, L, M, N, P, Q, R, S, T, V, W, Y | A, C, D, E, F, G, H, I, K, L, M, N, P, Q, R, S, T, V, W, Y |
| 190 | K | A, C, D, E, F, G, H, I, L, M, N, P, Q, R, S, T, V, W, Y | A, C, D, E, F, G, H, I, K, L, M, N, P, Q, R, S, T, V, W, Y |
| 191 | A | C, D, E, F, G, H, I, K, L, M, N, P, Q, R, S, T, V, W, Y | A, C, D, E, F, G, H, I, K, L, M, N, P, Q, R, S, T, V, W, Y |
| 192 | S | A, C, D, E, F, G, H, I, K, L, M, N, P, Q, R, T, V, W, Y | A, C, D, E, F, G, H, I, K, L, M, N, P, Q, R, S, T, V, W, Y |
| 193 | S | A, C, D, E, F, G, H, I, K, L, M, N, P, Q, R, T, V, W, Y | A, C, D, E, F, G, H, I, K, L, M, N, P, Q, R, S, T, V, W, Y |
| 194 | A | C, D, E, F, G, H, I, K, L, M, N, P, Q, R, S, T, V, W, Y | A, C, D, E, F, G, H, I, K, L, M, N, P, Q, R, S, T, V, W, Y |
| 195 | K | A, C, D, E, F, G, H, I, L, M, N, P, Q, R, S, T, V, W, Y | A, C, D, E, F, G, H, I, K, L, M, N, P, Q, R, S, T, V, W, Y |
| 196 | Q | A, C, D, E, F, G, H, I, K, L, M, N, P, R, S, T, V, W, Y | A, C, D, E, F, G, H, I, K, L, M, N, P, Q, R, S, T, V, W, Y |
| 197 | R | A, C, D, E, F, G, H, I, K, L, M, N, P, Q, S, T, V, W, Y | A, C, D, E, F, G, H, I, K, L, M, N, P, Q, R, S, T, V, W, Y |
| 198 | L | A, C, D, E, F, G, H, I, K, M, N, P, Q, R, S, T, V, W, Y | A, C, D, E, F, G, H, I, K, L, M, N, P, Q, R, S, T, V, W, Y |
| 199 | K | A, C, D, E, F, G, H, I, L, M, N, P, Q, R, S, T, V, W, Y | A, C, D, E, F, G, H, I, K, L, M, N, P, Q, R, S, T, V, W, Y |
| 200 | C | A, D, E, F, G, H, I, K, L, M, N, P, Q, R, S, T, V, W, Y | A, C, D, E, F, G, H, I, K, L, M, N, P, Q, R, S, T, V, W, Y |
| 201 | A | C, D, E, F, G, H, I, K, L, M, N, P, Q, R, S, T, V, W, Y | A, C, D, E, F, G, H, I, K, L, M, N, P, Q, R, S, T, V, W, Y |
| 276 | K | A, C, D, E, F, G, H, I, L, M, N, P, Q, R, S, T, V, W, Y | A, C, D, E, F, G, H, I, K, L, M, N, P, Q, R, S, T, V, W, Y |
| 410 | R | A, C, D, E, F, G, H, I, K, L, M, N, P, Q, S, T, V, W, Y | A, C, D, E, F, G, H, I, K, L, M, N, P, Q, R, S, T, V, W, Y |
| 411 | Y | A, C, D, E, F, G, H, I, K, L, M, N, P, Q, R, S, T, V, W | A, C, D, E, F, G, H, I, K, L, M, N, P, Q, R, S, T, V, W, Y |
| 414 | K | A, C, D, E, F, G, H, I, L, M, N, P, Q, R, S, T, V, W, Y | A, C, D, E, F, G, H, I, K, L, M, N, P, Q, R, S, T, V, W, Y |
| 415 | V | A, C, D, E, F, G, H, I, K, L, M, N, P, Q, R, S, T, W, Y | A, C, D, E, F, G, H, I, K, L, M, N, P, Q, R, S, T, V, W, Y |
| 416 | P | A, C, D, E, F, G, H, I, K, L, M, N, Q, R, S, T, V, W, Y | A, C, D, E, F, G, H, I, K, L, M, N, P, Q, R, S, T, V, W, Y |
| 417 | Q | A, C, D, E, F, G, H, I, K, L, M, N, P, R, S, T, V, W, Y | A, C, D, E, F, G, H, I, K, L, M, N, P, Q, R, S, T, V, W, Y |
| 418 | V | A, C, D, E, F, G, H, I, K, L, M, N, P, Q, R, S, T, W, Y | A, C, D, E, F, G, H, I, K, L, M, N, P, Q, R, S, T, V, W, Y |
| 419 | S | A, C, D, E, F, G, H, I, K, L, M, N, P, Q, R, T, V, W, Y | A, C, D, E, F, G, H, I, K, L, M, N, P, Q, R, S, T, V, W, Y |
| 420 | T | A, C, D, E, F, G, H, I, K, L, M, N, P, Q, R, S, V, W, Y | A, C, D, E, F, G, H, I, K, L, M, N, P, Q, R, S, T, V, W, Y |
| 421 | P | A, C, D, E, F, G, H, I, K, L, M, N, Q, R, S, T, V, W, Y | A, C, D, E, F, G, H, I, K, L, M, N, P, Q, R, S, T, V, W, Y |
| 422 | T | A, C, D, E, F, G, H, I, K, L, M, N, P, Q, R, S, V, W, Y | A, C, D, E, F, G, H, I, K, L, M, N, P, Q, R, S, T, V, W, Y |
| 423 | L | A, C, D, E, F, G, H, I, K, M, N, P, Q, R, S, T, V, W, Y | A, C, D, E, F, G, H, I, K, L, M, N, P, Q, R, S, T, V, W, Y |
| 424 | V | A, C, D, E, F, G, H, I, K, L, M, N, P, Q, R, S, T, W, Y | A, C, D, E, F, G, H, I, K, L, M, N, P, Q, R, S, T, V, W, Y |
| 425 | E | A, C, D, F, G, H, I, K, L, M, N, P, Q, R, S, T, V, W, Y | A, C, D, E, F, G, H, I, K, L, M, N, P, Q, R, S, T, V, W, Y |
| 426 | V | A, C, D, E, F, G, H, I, K, L, M, N, P, Q, R, S, T, W, Y | A, C, D, E, F, G, H, I, K, L, M, N, P, Q, R, S, T, V, W, Y |
| 457 | L | A, C, D, E, F, G, H, I, K, M, N, P, Q, R, S, T, V, W, Y | A, C, D, E, F, G, H, I, K, L, M, N, P, Q, R, S, T, V, W, Y |
| 458 | N | A, C, D, E, F, G, H, I, K, L, M, P, Q, R, S, T, V, W, Y | A, C, D, E, F, G, H, I, K, L, M, N, P, Q, R, S, T, V, W, Y |
| 459 | Q | A, C, D, E, F, G, H, I, K, L, M, N, P, R, S, T, V, W, Y | A, C, D, E, F, G, H, I, K, L, M, N, P, Q, R, S, T, V, W, Y |
| 460 | L | A, C, D, E, F, G, H, I, K, M, N, P, Q, R, S, T, V, W, Y | A, C, D, E, F, G, H, I, K, L, M, N, P, Q, R, S, T, V, W, Y |
| 461 | C | A, D, E, F, G, H, I, K, L, M, N, P, Q, R, S, T, V, W, Y | A, C, D, E, F, G, H, I, K, L, M, N, P, Q, R, S, T, V, W, Y |
| 462 | V | A, C, D, E, F, G, H, I, K, L, M, N, P, Q, R, S, T, W, Y | A, C, D, E, F, G, H, I, K, L, M, N, P, Q, R, S, T, V, W, Y |
| 463 | L | A, C, D, E, F, G, H, I, K, M, N, P, Q, R, S, T, V, W, Y | A, C, D, E, F, G, H, I, K, L, M, N, P, Q, R, S, T, V, W, Y |
| 464 | H | A, C, D, E, F, G, I, K, L, M, N, P, Q, R, S, T, V, W, Y | A, C, D, E, F, G, H, I, K, L, M, N, P, Q, R, S, T, V, W, Y |
| 465 | E | A, C, D, F, G, H, I, K, L, M, N, P, Q, R, S, T, V, W, Y | A, C, D, E, F, G, H, I, K, L, M, N, P, Q, R, S, T, V, W, Y |
| 466 | K | A, C, D, E, F, G, H, I, L, M, N, P, Q, R, S, T, V, W, Y | A, C, D, E, F, G, H, I, K, L, M, N, P, Q, R, S, T, V, W, Y |
| 467 | T | A, C, D, E, F, G, H, I, K, L, M, N, P, Q, R, S, V, W, Y | A, C, D, E, F, G, H, I, K, L, M, N, P, Q, R, S, T, V, W, Y |
| 468 | P | A, C, D, E, F, G, H, I, K, L, M, N, Q, R, S, T, V, W, Y | A, C, D, E, F, G, H, I, K, L, M, N, P, Q, R, S, T, V, W, Y |
| 469 | V | A, C, D, E, F, G, H, I, K, L, M, N, P, Q, R, S, T, W, Y | A, C, D, E, F, G, H, I, K, L, M, N, P, Q, R, S, T, V, W, Y |
| 470 | S | A, C, D, E, F, G, H, I, K, L, M, N, P, Q, R, T, V, W, Y | A, C, D, E, F, G, H, I, K, L, M, N, P, Q, R, S, T, V, W, Y |
| 471 | D | A, C, E, F, G, H, I, K, L, M, N, P, Q, R, S, T, V, W, Y | A, C, D, E, F, G, H, I, K, L, M, N, P, Q, R, S, T, V, W, Y |
| 472 | R | A, C, D, E, F, G, H, I, K, L, M, N, P, Q, S, T, V, W, Y | A, C, D, E, F, G, H, I, K, L, M, N, P, Q, R, S, T, V, W, Y |
| 492 | E | A, C, D, F, G, H, I, K, L, M, N, P, Q, R, S, T, V, W, Y | A, C, D, E, F, G, H, I, K, L, M, N, P, Q, R, S, T, V, W, Y |
| 493 | V | A, C, D, E, F, G, H, I, K, L, M, N, P, Q, R, S, T, W, Y | A, C, D, E, F, G, H, I, K, L, M, N, P, Q, R, S, T, V, W, Y |
| 494 | D | A, C, E, F, G, H, I, K, L, M, N, P, Q, R, S, T, V, W, Y | A, C, D, E, F, G, H, I, K, L, M, N, P, Q, R, S, T, V, W, Y |
| 495 | E | A, C, D, F, G, H, I, K, L, M, N, P, Q, R, S, T, V, W, Y | A, C, D, E, F, G, H, I, K, L, M, N, P, Q, R, S, T, V, W, Y |
| 496 | T | A, C, D, E, F, G, H, I, K, L, M, N, P, Q, R, S, V, W, Y | A, C, D, E, F, G, H, I, K, L, M, N, P, Q, R, S, T, V, W, Y |
| 497 | Y | A, C, D, E, F, G, H, I, K, L, M, N, P, Q, R, S, T, V, W | A, C, D, E, F, G, H, I, K, L, M, N, P, Q, R, S, T, V, W, Y |
| 498 | V | A, C, D, E, F, G, H, I, K, L, M, N, P, Q, R, S, T, W, Y | A, C, D, E, F, G, H, I, K, L, M, N, P, Q, R, S, T, V, W, Y |
| 499 | P | A, C, D, E, F, G, H, I, K, L, M, N, Q, R, S, T, V, W, Y | A, C, D, E, F, G, H, I, K, L, M, N, P, Q, R, S, T, V, W, Y |
| 500 | K | A, C, D, E, F, G, H, I, L, M, N, P, Q, R, S, T, V, W, Y | A, C, D, E, F, G, H, I, K, L, M, N, P, Q, R, S, T, V, W, Y |
| 501 | E | A, C, D, F, G, H, I, K, L, M, N, P, Q, R, S, T, V, W, Y | A, C, D, E, F, G, H, I, K, L, M, N, P, Q, R, S, T, V, W, Y |
| 502 | F | A, C, D, E, G, H, I, K, L, M, N, P, Q, R, S, T, V, W, Y | A, C, D, E, F, G, H, I, K, L, M, N, P, Q, R, S, T, V, W, Y |
| 503 | N | A, C, D, E, F, G, H, I, K, L, M, P, Q, R, S, T, V, W, Y | A, C, D, E, F, G, H, I, K, L, M, N, P, Q, R, S, T, V, W, Y |
| 504 | A | C, D, E, F, G, H, I, K, L, M, N, P, Q, R, S, T, V, W, Y | A, C, D, E, F, G, H, I, K, L, M, N, P, Q, R, S, T, V, W, Y |
| 505 | E | A, C, D, F, G, H, I, K, L, M, N, P, Q, R, S, T, V, W, Y | A, C, D, E, F, G, H, I, K, L, M, N, P, Q, R, S, T, V, W, Y |
| 506 | T | A, C, D, E, F, G, H, I, K, L, M, N, P, Q, R, S, V, W, Y | A, C, D, E, F, G, H, I, K, L, M, N, P, Q, R, S, T, V, W, Y |
| 507 | F | A, C, D, E, G, H, I, K, L, M, N, P, Q, R, S, T, V, W, Y | A, C, D, E, F, G, H, I, K, L, M, N, P, Q, R, S, T, V, W, Y |
| 508 | T | A, C, D, E, F, G, H, I, K, L, M, N, P, Q, R, S, V, W, Y | A, C, D, E, F, G, H, I, K, L, M, N, P, Q, R, S, T, V, W, Y |
| 509 | F | A, C, D, E, G, H, I, K, L, M, N, P, Q, R, S, T, V, W, Y | A, C, D, E, F, G, H, I, K, L, M, N, P, Q, R, S, T, V, W, Y |
| 510 | H | A, C, D, E, F, G, I, K, L, M, N, P, Q, R, S, T, V, W, Y | A, C, D, E, F, G, H, I, K, L, M, N, P, Q, R, S, T, V, W, Y |
| 511 | A | C, D, E, F, G, H, I, K, L, M, N, P, Q, R, S, T, V, W, Y | A, C, D, E, F, G, H, I, K, L, M, N, P, Q, R, S, T, V, W, Y |
| 512 | D | A, C, E, F, G, H, I, K, L, M, N, P, Q, R, S, T, V, W, Y | A, C, D, E, F, G, H, I, K, L, M, N, P, Q, R, S, T, V, W, Y |
| 513 | I | A, C, D, E, F, G, H, K, L, M, N, P, Q, R, S, T, V, W, Y | A, C, D, E, F, G, H, I, K, L, M, N, P, Q, R, S, T, V, W, Y |
| 514 | C | A, D, E, F, G, H, I, K, L, M, N, P, Q, R, S, T, V, W, Y | A, C, D, E, F, G, H, I, K, L, M, N, P, Q, R, S, T, V, W, Y |
| 515 | T | A, C, D, E, F, G, H, I, K, L, M, N, P, Q, R, S, V, W, Y | A, C, D, E, F, G, H, I, K, L, M, N, P, Q, R, S, T, V, W, Y |
| 516 | L | A, C, D, E, F, G, H, I, K, M, N, P, Q, R, S, T, V, W, Y | A, C, D, E, F, G, H, I, K, L, M, N, P, Q, R, S, T, V, W, Y |
| 517 | S | A, C, D, E, F, G, H, I, K, L, M, N, P, Q, R, T, V, W, Y | A, C, D, E, F, G, H, I, K, L, M, N, P, Q, R, S, T, V, W, Y |
| 518 | E | A, C, D, F, G, H, I, K, L, M, N, P, Q, R, S, T, V, W, Y | A, C, D, E, F, G, H, I, K, L, M, N, P, Q, R, S, T, V, W, Y |
| 519 | K | A, C, D, E, F, G, H, I, L, M, N, P, Q, R, S, T, V, W, Y | A, C, D, E, F, G, H, I, K, L, M, N, P, Q, R, S, T, V, W, Y |
| 520 | E | A, C, D, F, G, H, I, K, L, M, N, P, Q, R, S, T, V, W, Y | A, C, D, E, F, G, H, I, K, L, M, N, P, Q, R, S, T, V, W, Y |
| 521 | R | A, C, D, E, F, G, H, I, K, L, M, N, P, Q, S, T, V, W, Y | A, C, D, E, F, G, H, I, K, L, M, N, P, Q, R, S, T, V, W, Y |
| 522 | Q | A, C, D, E, F, G, H, I, K, L, M, N, P, R, S, T, V, W, Y | A, C, D, E, F, G, H, I, K, L, M, N, P, Q, R, S, T, V, W, Y |
| 523 | I | A, C, D, E, F, G, H, K, L, M, N, P, Q, R, S, T, V, W, Y | A, C, D, E, F, G, H, I, K, L, M, N, P, Q, R, S, T, V, W, Y |
| 524 | K | A, C, D, E, F, G, H, I, L, M, N, P, Q, R, S, T, V, W, Y | A, C, D, E, F, G, H, I, K, L, M, N, P, Q, R, S, T, V, W, Y |
| 525 | K | A, C, D, E, F, G, H, I, L, M, N, P, Q, R, S, T, V, W, Y | A, C, D, E, F, G, H, I, K, L, M, N, P, Q, R, S, T, V, W, Y |
| 526 | Q | A, C, D, E, F, G, H, I, K, L, M, N, P, R, S, T, V, W, Y | A, C, D, E, F, G, H, I, K, L, M, N, P, Q, R, S, T, V, W, Y |
| 527 | T | A, C, D, E, F, G, H, I, K, L, M, N, P, Q, R, S, V, W, Y | A, C, D, E, F, G, H, I, K, L, M, N, P, Q, R, S, T, V, W, Y |
| 528 | A | C, D, E, F, G, H, I, K, L, M, N, P, Q, R, S, T, V, W, Y | A, C, D, E, F, G, H, I, K, L, M, N, P, Q, R, S, T, V, W, Y |
| 529 | L | A, C, D, E, F, G, H, I, K, M, N, P, Q, R, S, T, V, W, Y | A, C, D, E, F, G, H, I, K, L, M, N, P, Q, R, S, T, V, W, Y |
| 530 | V | A, C, D, E, F, G, H, I, K, L, M, N, P, Q, R, S, T, W, Y | A, C, D, E, F, G, H, I, K, L, M, N, P, Q, R, S, T, V, W, Y |
| 531 | E | A, C, D, F, G, H, I, K, L, M, N, P, Q, R, S, T, V, W, Y | A, C, D, E, F, G, H, I, K, L, M, N, P, Q, R, S, T, V, W, Y |
| 532 | L | A, C, D, E, F, G, H, I, K, M, N, P, Q, R, S, T, V, W, Y | A, C, D, E, F, G, H, I, K, L, M, N, P, Q, R, S, T, V, W, Y |
| 533 | V | A, C, D, E, F, G, H, I, K, L, M, N, P, Q, R, S, T, W, Y | A, C, D, E, F, G, H, I, K, L, M, N, P, Q, R, S, T, V, W, Y |
| 534 | K | A, C, D, E, F, G, H, I, L, M, N, P, Q, R, S, T, V, W, Y | A, C, D, E, F, G, H, I, K, L, M, N, P, Q, R, S, T, V, W, Y |
| 535 | H | A, C, D, E, F, G, I, K, L, M, N, P, Q, R, S, T, V, W, Y | A, C, D, E, F, G, H, I, K, L, M, N, P, Q, R, S, T, V, W, Y |
| 536 | K | A, C, D, E, F, G, H, I, L, M, N, P, Q, R, S, T, V, W, Y | A, C, D, E, F, G, H, I, K, L, M, N, P, Q, R, S, T, V, W, Y |
| 537 | P | A, C, D, E, F, G, H, I, K, L, M, N, Q, R, S, T, V, W, Y | A, C, D, E, F, G, H, I, K, L, M, N, P, Q, R, S, T, V, W, Y |
| 538 | K | A, C, D, E, F, G, H, I, L, M, N, P, Q, R, S, T, V, W, Y | A, C, D, E, F, G, H, I, K, L, M, N, P, Q, R, S, T, V, W, Y |
| 550 | D | A, C, E, F, G, H, I, K, L, M, N, P, Q, R, S, T, V, W, Y | A, C, D, E, F, G, H, I, K, L, M, N, P, Q, R, S, T, V, W, Y |
| 551 | F | A, C, D, E, G, H, I, K, L, M, N, P, Q, R, S, T, V, W, Y | A, C, D, E, F, G, H, I, K, L, M, N, P, Q, R, S, T, V, W, Y |
| 552 | A | C, D, E, F, G, H, I, K, L, M, N, P, Q, R, S, T, V, W, Y | A, C, D, E, F, G, H, I, K, L, M, N, P, Q, R, S, T, V, W, Y |
| 553 | A | C, D, E, F, G, H, I, K, L, M, N, P, Q, R, S, T, V, W, Y | A, C, D, E, F, G, H, I, K, L, M, N, P, Q, R, S, T, V, W, Y |
| 554 | F | A, C, D, E, G, H, I, K, L, M, N, P, Q, R, S, T, V, W, Y | A, C, D, E, F, G, H, I, K, L, M, N, P, Q, R, S, T, V, W, Y |
| 555 | V | A, C, D, E, F, G, H, I, K, L, M, N, P, Q, R, S, T, W, Y | A, C, D, E, F, G, H, I, K, L, M, N, P, Q, R, S, T, V, W, Y |
| 556 | E | A, C, D, F, G, H, I, K, L, M, N, P, Q, R, S, T, V, W, Y | A, C, D, E, F, G, H, I, K, L, M, N, P, Q, R, S, T, V, W, Y |
| 557 | K | A, C, D, E, F, G, H, I, L, M, N, P, Q, R, S, T, V, W, Y | A, C, D, E, F, G, H, I, K, L, M, N, P, Q, R, S, T, V, W, Y |
| 558 | C | A, D, E, F, G, H, I, K, L, M, N, P, Q, R, S, T, V, W, Y | A, C, D, E, F, G, H, I, K, L, M, N, P, Q, R, S, T, V, W, Y |
| 559 | C | A, D, E, F, G, H, I, K, L, M, N, P, Q, R, S, T, V, W, Y | A, C, D, E, F, G, H, I, K, L, M, N, P, Q, R, S, T, V, W, Y |
| 560 | K | A, C, D, E, F, G, H, I, L, M, N, P, Q, R, S, T, V, W, Y | A, C, D, E, F, G, H, I, K, L, M, N, P, Q, R, S, T, V, W, Y |
| 561 | A | C, D, E, F, G, H, I, K, L, M, N, P, Q, R, S, T, V, W, Y | A, C, D, E, F, G, H, I, K, L, M, N, P, Q, R, S, T, V, W, Y |
| 562 | D | A, C, E, F, G, H, I, K, L, M, N, P, Q, R, S, T, V, W, Y | A, C, D, E, F, G, H, I, K, L, M, N, P, Q, R, S, T, V, W, Y |
| 563 | D | A, C, E, F, G, H, I, K, L, M, N, P, Q, R, S, T, V, W, Y | A, C, D, E, F, G, H, I, K, L, M, N, P, Q, R, S, T, V, W, Y |
| 564 | K | A, C, D, E, F, G, H, I, L, M, N, P, Q, R, S, T, V, W, Y | A, C, D, E, F, G, H, I, K, L, M, N, P, Q, R, S, T, V, W, Y |
| 565 | E | A, C, D, F, G, H, I, K, L, M, N, P, Q, R, S, T, V, W, Y | A, C, D, E, F, G, H, I, K, L, M, N, P, Q, R, S, T, V, W, Y |
| 566 | T | A, C, D, E, F, G, H, I, K, L, M, N, P, Q, R, S, V, W, Y | A, C, D, E, F, G, H, I, K, L, M, N, P, Q, R, S, T, V, W, Y |
| 567 | C | A, D, E, F, G, H, I, K, L, M, N, P, Q, R, S, T, V, W, Y | A, C, D, E, F, G, H, I, K, L, M, N, P, Q, R, S, T, V, W, Y |
| 568 | F | A, C, D, E, G, H, I, K, L, M, N, P, Q, R, S, T, V, W, Y | A, C, D, E, F, G, H, I, K, L, M, N, P, Q, R, S, T, V, W, Y |
| 569 | A | C, D, E, F, G, H, I, K, L, M, N, P, Q, R, S, T, V, W, Y | A, C, D, E, F, G, H, I, K, L, M, N, P, Q, R, S, T, V, W, Y |
| 570 | E | A, C, D, F, G, H, I, K, L, M, N, P, Q, R, S, T, V, W, Y | A, C, D, E, F, G, H, I, K, L, M, N, P, Q, R, S, T, V, W, Y |
| 571 | E | A, C, D, F, G, H, I, K, L, M, N, P, Q, R, S, T, V, W, Y | A, C, D, E, F, G, H, I, K, L, M, N, P, Q, R, S, T, V, W, Y |
| 572 | G | A, C, D, E, F, H, I, K, L, M, N, P, Q, R, S, T, V, W, Y | A, C, D, E, F, G, H, I, K, L, M, N, P, Q, R, S, T, V, W, Y |
| 573 | K | A, C, D, E, F, G, H, I, L, M, N, P, Q, R, S, T, V, W, Y | A, C, D, E, F, G, H, I, K, L, M, N, P, Q, R, S, T, V, W, Y |
| 574 | K | A, C, D, E, F, G, H, I, L, M, N, P, Q, R, S, T, V, W, Y | A, C, D, E, F, G, H, I, K, L, M, N, P, Q, R, S, T, V, W, Y |
| 575 | L | A, C, D, E, F, G, H, I, K, M, N, P, Q, R, S, T, V, W, Y | A, C, D, E, F, G, H, I, K, L, M, N, P, Q, R, S, T, V, W, Y |
| 576 | V | A, C, D, E, F, G, H, I, K, L, M, N, P, Q, R, S, T, W, Y | A, C, D, E, F, G, H, I, K, L, M, N, P, Q, R, S, T, V, W, Y |
| 577 | A | C, D, E, F, G, H, I, K, L, M, N, P, Q, R, S, T, V, W, Y | A, C, D, E, F, G, H, I, K, L, M, N, P, Q, R, S, T, V, W, Y |
| 578 | A | C, D, E, F, G, H, I, K, L, M, N, P, Q, R, S, T, V, W, Y | A, C, D, E, F, G, H, I, K, L, M, N, P, Q, R, S, T, V, W, Y |
| 579 | S | A, C, D, E, F, G, H, I, K, L, M, N, P, Q, R, T, V, W, Y | A, C, D, E, F, G, H, I, K, L, M, N, P, Q, R, S, T, V, W, Y |
| 580 | Q | A, C, D, E, F, G, H, I, K, L, M, N, P, R, S, T, V, W, Y | A, C, D, E, F, G, H, I, K, L, M, N, P, Q, R, S, T, V, W, Y |
| 581 | A | C, D, E, F, G, H, I, K, L, M, N, P, Q, R, S, T, V, W, Y | A, C, D, E, F, G, H, I, K, L, M, N, P, Q, R, S, T, V, W, Y |
| 582 | A | C, D, E, F, G, H, I, K, L, M, N, P, Q, R, S, T, V, W, Y | A, C, D, E, F, G, H, I, K, L, M, N, P, Q, R, S, T, V, W, Y |
| 583 | L | A, C, D, E, F, G, H, I, K, M, N, P, Q, R, S, T, V, W, Y | A, C, D, E, F, G, H, I, K, L, M, N, P, Q, R, S, T, V, W, Y |
| 584 | G | A, C, D, E, F, H, I, K, L, M, N, P, Q, R, S, T, V, W, Y | A, C, D, E, F, G, H, I, K, L, M, N, P, Q, R, S, T, V, W, Y |
| 585 | L | A, C, D, E, F, G, H, I, K, M, N, P, Q, R, S, T, V, W, Y | A, C, D, E, F, G, H, I, K, L, M, N, P, Q, R, S, T, V, W, Y |

[0250] In Table 2, above, reference is made to HSA (SEQ ID NO: 2). However, the invention also includes variants of non-human albumins and/or fragments of human or non-human albumin having the herein mentioned alterations at positions equivalent to those stated for HSA. The skilled person can identify equivalent positions by sequence alignment with SEQ ID NO: 2.

[0251] The variant may further comprise alterations are at one or more (several) positions selected from the group consisting of 34, 38, 40, 75, 76, 80, 82, 83, 86, 90, 91, 104, 113, 115, 116, 200, 461, 471, 496, 498, 501, 503, 504, 505, 506, 512, 514, 538, 550, 558, 559, 560, 562, 564, 565, 567, 573, 574, 577, 578, 579, 580, 581, 582, 584, 585 (numbers relative to SEQ ID No. 2), more particularly a substitution to or insertion of Cys at one or more (several) of these positions. For example, substitution of one or more (several) of positions 34, 38, 40, 76, 80, 82, 83, 86, 104, 113, 115, 116, 471, 496, 498, 501, 503, 504, 505, 506, 512, 538, 550, 560, 562, 564, 565, 573, 574, 577, 578, 579, 580, 581, 582, 584, 585 from the native residue (e.g. non-Cys residue) to Cys to introduce a Cys which may be available for conjugation via its thiol group and/or a deletion of or substitution of one or more (several) of positions 91, 200, 461, 514, 558, 559, 567 from Cys, to a non-Cys residue which may break an existing disulphide bond to generate a Cys which may be available for conjugation via its thiol group. One or more (several) of these positions may be altered alone or, more preferably, in combination with another position or positions disclosed herein.

[0252] The variant may further comprise alterations are at one or more (several) positions selected from the group consisting of 63, 82, 84, 87, 90, 106, 114, 119, 146, 464, 201, 494, 501, 503, 505, 510, 513, 518, 525, 529, 533, 535, 536, 537, 550, 550, 557, 560, 563, 565, 570, 573, 574, 574, 584 (numbers relative to SEQ ID No. 2). One or more (several) of these positions may be altered alone or, more preferably, in combination with another position or positions disclosed herein. It is preferred that if an alteration selected from more particularly one or more (several) of the following substitutions: D63N, E82K, E84K, D87N, L90P, K106E, R114G, E119K, V146E, H464A, H464N, C201F, D494N, E501K, E503K, E505K, H510A, I513N, D518N, K525E, E529K, V533M, H535A, K536E, I537N, D550G, D550A, V557M, K560E, D563N, E565K, E570K, K573E, K574N, K574E, K584E, it is combined with an alteration at another position or positions disclosed herein.

[0253] For the avoidance of doubt, variants of albumin comprising a C-terminal truncation of from 1 to 88 amino acids are included in all aspects of the invention and also form an aspect of the invention in their own right. Therefore, a variant may comprise or consist of an albumin having a sequence equivalent to positions 1 to 497 to 1 to 584 of SEQ ID NO: 2. Such a variant may be prepared by introducing a stop codon at any of positions 497, 498, 499, 500, 501, 502, 503, 504, 505, 506, 507, 508, 509, 510, 511, 512, 513, 514, 515, 516, 517, 518, 519, 520, 521, 522, 523, 524, 525, 526, 527, 528, 529, 530, 531, 532, 533, 534, 535, 536, 537, 538, 539, 540, 541, 542, 543, 544, 545, 546, 547, 548, 549, 550, 551, 552, 553, 554, 555, 556, 557, 558, 559, 560, 561, 562, 563, 564, 565, 566, 567, 568, 569, 570, 571, 572, 573, 574, 575, 576, 577, 578, 579, 580, 581, 582, 583, 584, 585. Thus the albumin may be truncated by 1, 2, 3, 4, 5, 6, 7, 8, 9, 10, 11, 12, 13, 14, 15, 16, 17, 18, 19, 20, 21, 22, 23, 24, 25, 26, 27, 28, 29, 30, 31, 32, 33, 34, 35, 36, 37, 38, 39, 40, 41, 42, 43, 44, 45, 46, 47, 48, 49, 50, 51, 52, 53, 54, 55, 56, 57, 58, 59, 60, 61, 62, 63, 64, 65, 66, 67, 68, 69, 70, 71, 72, 73, 74, 75, 76, 77, 78, 79, 80, 81, 82, 83, 84, 85, 86, 87, 88 relative to the parent albumin, or fragment thereof, from which it is derived. It is preferred that the truncation is no longer than 88 amino acids, therefore it is preferred that the albumin is be truncated by at most 1, 2, 3, 4, 5, 6, 7, 8, 9, 10, 11, 12, 13, 14, 15, 16, 17, 18, 19, 20, 21, 22, 23, 24, 25, 26, 27, 28, 29, 30, 31, 32, 33, 34, 35, 36, 37, 38, 39, 40, 41, 42, 43, 44, 45, 46, 47, 48, 49, 50, 51, 52, 53, 54, 55, 56, 57, 58, 59, 60, 61, 62, 63, 64, 65, 66, 67, 68, 69, 70, 71, 72, 73, 74, 75, 76, 77, 78, 79, 80, 81, 82, 83, 84, 85, 86, 87, 88 amino acids relative to the parent albumin, or fragment thereof, from which it is derived. It is less preferred that the variant comprises a stop codon at position 406, 407, 408, 409, 410, 411 or 585. The variant may or may not comprise one or more (several) other alterations as described herein. Truncations may be referred to as ‘fragments’.

[0254] Preferred truncations are at positions from 500 to 584, such as from 573 or 574 to 584. Such variants are thus truncated relative to a parent albumin, e.g. HSA (SEQ ID NO: 2), but apply equally to fragments of albumin such as DII+DIII, DIII, or DI+DIII. The skilled person can determine the location of the truncation within such a fragment by alignment of the fragment with HSA. Thus the variant may comprise or consist of the N-terminal at least 85 to 99.5% of a parent albumin or fragment thereof, such as the N-terminal at least 85, 86, 87, 88, 89, 90, 91, 92, 93, 94, 95, 96, 97, 98, 99 or 99.5%. Preferred truncations comprise the N-terminal 85, 86, 97 or 98% of a parent albumin or fragment thereof. Accordingly, methods of preparation, fragments, fusions, conjugates, nanoparticles, associates and compositions may comprise such a truncated variant. It is preferred that the truncated variant retains position 573 (or equivalent thereof). It is further preferred that the amino acid at 573 is Pro, Trp or Tyr.

[0255] In one embodiment the variant albumin or fragments thereof, or fusion polypeptides comprising the variant albumin or fragments thereof according to the invention contains one substitution at a position corresponding to a position in HSA selected from the group consisting of 30, 31, 32, 33, 34, 35, 36, 37, 38, 39, 40, 41, 75, 76, 77, 78, 79, 80, 81, 82, 83, 84, 85, 86, 87, 88, 89, 90, 91, 104, 105, 106, 107, 108, 109, 110, 111, 112, 113, 114, 115, 116, 117, 118, 119, 120, 144, 145, 146, 147, 148, 149, 150, 186, 187, 188, 189, 190, 191, 192, 193, 194, 195, 196, 197, 198, 199, 200, 201, 276, 410, 411, 414, 415, 416, 418, 419, 420, 421, 422, 423, 424, 425, 426, 457, 458, 459, 460, 461, 462, 463, 465, 466, 467, 468, 469, 470, 471, 472, 497, 498, 502, 507, 508, 509, 511, 512, 513, 514, 515, 516, 517, 518, 519, 520, 521, 522, 523, 524, 525, 526, 527, 528, 529, 530, 531, 532, 533, 534, 551, 552, 553, 554, 555, 556, 557, 558, 559, 560, 561, 562, 563, 564, 565, 567, 568, 569, 570, 571, 572, 576, 583, 585, in SEQ ID NO: 2.

[0256] In one embodiment the variant albumin or fragments thereof, or fusion polypeptides comprising the variant albumin or fragments thereof according to the invention contains one substitution at a position corresponding to a position in HSA selected from the group consisting of 30, 31, 32, 33, 35, 36, 37, 39, 41, 77, 78, 79, 81, 84, 85, 87, 88, 89, 105, 106, 107, 108, 109, 110, 111, 112, 117, 118, 120, 144, 145, 146, 147, 148, 149, 150, 186, 187, 188, 189, 190, 191, 192, 193, 194, 195, 196, 197, 198, 199, 201, 276, 410, 411, 414, 415, 416, 418, 419, 420, 421, 422, 423, 424, 425, 426, 457, 458, 459, 460, 462, 463, 465, 466, 467, 468, 469, 470, 472, 497, 502, 507, 508, 509, 511, 513, 515, 516, 517, 518, 519, 520, 521, 522, 523, 524, 525, 526, 527, 528, 529, 530, 531, 532, 534, 551, 552, 553, 554, 555, 556, 557, 561, 568, 569, 570, 571, 572, 576, 583, in SEQ ID NO: 2.

[0257] The variant albumin, fragment thereof or fusion polypeptides comprising variant albumin or a fragment thereof according to the invention may comprise additional substitutions, insertions or deletions at one or more (several) positions corresponding to other positions in HSA. In another embodiment the variant albumin or fragments thereof, or fusion polypeptides comprising variant albumin or fragments thereof according to the invention contains two, three, four, five, six, seven, eight, nine, ten, eleven, twelve, thirteen, fourteen, fifteen, sixteen, seventeen, eighteen, nineteen, twenty or even more substitutions at positions corresponding to positions in HSA selected from the group consisting of 30 to 41, 75 to 91, 104 to 120, 144 to 150, 186 to 201, 414 to 426, 457 to 472, 492 to 538, 550 to 585, 276, 410 and/or 411 of the mature polypeptide of SEQ ID NO: 2, wherein, it is preferred that, when the polypeptide comprises one or more (several) alterations selected from (i) the group consisting of positions 417, 464, 492, 493, 494, 495, 496, 499, 500, 501, 503, 504, 505, 506, 510, 535, 536, 537, 538, 540, 550, 573, 574, 575, 577, 578, 579, 580, 581, 582 and 584, (ii) the group consisting of positions 34, 38, 40, 75, 76, 80, 82, 83, 86, 90, 91, 104, 113, 115, 116, 200, 461, 471, 496, 498, 501, 503, 504, 505, 506, 512, 514, 538, 550, 558, 559, 560, 562, 564, 565, 567, 573, 574, 577, 578, 579, 580, 581, 582, 584, 585 (particularly a substitution of one or more (several) of positions 34, 38, 40, 76, 80, 82, 83, 86, 104, 113, 115, 116, 471, 496, 498, 501, 503, 504, 505, 506, 512, 538, 550, 560, 562, 564, 565, 573, 574, 577, 578, 579, 580, 581, 582, 584, 585 from the native residue (e.g. non-Cys residue) to Cys and/or a deletion of or substitution of one or more (several) of positions 91, 200, 461, 514, 558, 559, 567 from Cys, to a non-Cys residue), or the group consisting of positions (iii) 63, 82, 84, 87, 90, 106, 114, 119, 146, 464, 201, 494, 501, 503, 505, 510, 513, 518, 525, 529, 533, 535, 536, 537, 550, 550, 557, 560, 563, 565, 570, 573, 574, 574, 584 (particularly one or more of (several) D63N, E82K, E84K, D87N, L90P, K106E, R114G, E119K, V146E, H464A, C201F, D494N, E501K, E503K, E505K, H510A, 1513N, D518N, K525E, E529K, V533M, H535A, K536E, I537N, D550G, D550A, V557M, K560E, D563N, E565K, E570K, K573E, K574N, K574E, K584E); the polypeptide also comprises one or more (several) alterations at a position selected from group consisting of positions 30, 31, 32, 33, 34, 35, 36, 37, 38, 39, 40, 41, 75, 76, 77, 78, 79, 80, 81, 82, 83, 84, 85, 86, 87, 88, 89, 90, 91, 104, 105, 106, 107, 108, 109, 110, 111, 112, 113, 114, 115, 116, 117, 118, 119, 120, 144, 145, 146, 147, 148, 149, 150, 186, 187, 188, 189, 190, 191, 192, 193, 194, 195, 196, 197, 198, 199, 200, 201, 276, 410, 411, 414, 415, 416, 418, 419, 420, 421, 422, 423, 424, 425, 426, 457, 458, 459, 460, 461, 462, 463, 465, 466, 467, 468, 469, 470, 471, 472, 497, 498, 502, 507, 508, 509, 511, 512, 513, 514, 515, 516, 517, 518, 519, 520, 521, 522, 523, 524, 525, 526, 527, 528, 529, 530, 531, 532, 533, 534, 551, 552, 553, 554, 555, 556, 557, 558, 559, 560, 561, 562, 563, 564, 565, 567, 568, 569, 570, 571, 572, 576, 583, 585 and/or a stop codon inserted or substituted at a position selected from 497 to 585. The variant albumin or fragments thereof, or fusion polypeptides comprising variant albumin or fragments thereof according to the invention may comprise additional substitutions, insertions or deletions at positions corresponding to other positions in HSA.

[0258] In a further embodiment the variants of albumin or fragments thereof, or fusion polypeptides comprising variant albumin or a fragment thereof according to the invention have a plasma half-life that is longer than the plasma half-life of the parent or reference albumin fragment thereof or fusion polypeptide comprising the parent or reference albumin or a fragment thereof and/or an stronger binding affinity to FcRn.

[0259] In a further embodiment the variants of albumin or fragments thereof, or fusion polypeptides comprising variant albumin or fragments thereof according to the invention have a plasma half-life that is shorter than the plasma half-life of the parent or reference albumin fragment thereof or fusion polypeptide comprising the parent or reference albumin or a fragment thereof and/or an weaker binding affinity to FcRn.

[0260] In addition to the one or more (several) substitutions at one or more (several) positions corresponding to positions 30, 31, 32, 33, 34, 35, 36, 37, 38, 39, 40, 41, 75, 76, 77, 78, 79, 80, 81, 82, 83, 84, 85, 86, 87, 88, 89, 90, 91, 104, 105, 106, 107, 108, 109, 110, 111, 112, 113, 114, 115, 116, 117, 118, 119, 120, 144, 145, 146, 147, 148, 149, 150, 186, 187, 188, 189, 190, 191, 192, 193, 194, 195, 196, 197, 198, 199, 200, 201, 276, 410, 411, 414, 415, 416, 418, 419, 420, 421, 422, 423, 424, 425, 426, 457, 458, 459, 460, 461, 462, 463, 465, 466, 467, 468, 469, 470, 471, 472, 497, 498, 502, 507, 508, 509, 511, 512, 513, 514, 515, 516, 517, 518, 519, 520, 521, 522, 523, 524, 525, 526, 527, 528, 529, 530, 531, 532, 533, 534, 551, 552, 553, 554, 555, 556, 557, 558, 559, 560, 561, 562, 563, 564, 565, 567, 568, 569, 570, 571, 572, 576, 583, 585 in SEQ ID NO: 2 the variant albumin or fragments thereof, or fusion polypeptides comprising variant albumin or fragments thereof according to the invention may contain additional substitutions, deletions or insertions in other positions of the molecules. Such additional substitutions, deletions or insertions may be useful in order to alter other properties of the molecules such as but not limited to altered glycosylation; introduction of reactive groups of the surface such a thiol groups, removing/generating a carbamoylation site; etc.

[0261] Residues that might be altered in order to provide reactive residues on the surface and which advantageously could be applied to the invention has been disclosed in WO2010/092135 (incorporated herein by reference). Particular preferred residues include the positions corresponding to positions in SEQ ID NO: 2.

[0262] As examples of alterations that can be made in SEQ ID NO: 2 or in corresponding positions in other albumins in order to provide a reactive thiol group on the surface includes alterations corresponding to following alterations in SEQ ID NO: 2: L585C, D1C, A2C, D562C, A364C, A5040, E5050, T79C, E86C, D129C, D549C, A581C, D121C, E82C, S270C, A578C, L595LC, D1DC, A2AC, D562DC, A364AC, A504AC, E505EC, T79TC, E86EC, D129DC, D549DC, A581AC, A581AC, D121DC, E82EC, S270SC, A579AC, C360*, C316*, C75*, C168*, C558*, C361*, C91*, C124*, C169* and C567*. Alternatively a cysteine residue may be added to the N or C terminal of albumin. The term ‘reactive thiol’ means and/or includes a thiol group provided by a Cys which is not disulphide bonded to a Cysteine and/or which is sterically available for binding to a partner such as a conjugation partner.

### Polynucleotides

[0263] A fourth aspect of the invention relates to isolated polynucleotides that encode any of the variants of the invention. The polynucleotide may be an isolated polynucleotide. The polynucleotide may be comprised a in a vector (such as a plasmid) and/or in a host cell.

### Nucleic Acid Constructs

[0264] The invention also relates to nucleic acid constructs comprising a polynucleotide encoding a variant of the invention operably linked to one or more (several) control sequences that direct the expression of the coding sequence in a suitable host cell under conditions compatible with the control sequences.

[0265] A polynucleotide may be manipulated in a variety of ways to provide for expression of a variant. Manipulation of the polynucleotide prior to its insertion into a vector may be desirable or necessary depending on the expression vector. The techniques for modifying polynucleotides utilizing recombinant DNA methods are well known in the art.

[0266] The control sequence may be a promoter sequence, which is recognized by a host cell for expression of the polynucleotide. The promoter sequence contains transcriptional control sequences that mediate the expression of the variant. The promoter may be any nucleic acid sequence that shows transcriptional activity in the host cell including mutant, truncated, and hybrid promoters, and may be obtained from genes encoding extracellular or intracellular polypeptides either homologous or heterologous to the host cell.

[0267] In a yeast host, useful promoters are obtained from the genes for Saccharomyces cerevisiae enolase (ENO-1), Saccharomyces cerevisiae protease A (PRA1), Saccharomyces cerevisiae protease B (PRB1), Saccharomyces cerevisiae translation elongation factor (TEF1), Saccharomyces cerevisiae translation elongation factor (TEF2), Saccharomyces cerevisiae galactokinase (GAL1), Saccharomyces cerevisiae alcohol dehydrogenase/glyceraldehyde-3-phosphate dehydrogenase (ADH1, ADH2/GAP), Saccharomyces cerevisiae triose phosphate isomerase (TPI), Saccharomyces cerevisiae metallothionein (CUP1), and Saccharomyces cerevisiae 3-phosphoglycerate kinase. Other useful promoters for yeast host cells are described by Romanos et al., 1992, Yeast 8: 423-488.

[0268] The skilled person knows useful promoters for use in rice and mammalian cells, such as CHO or HEK. In a rice host, useful promoters are obtained from cauliflower mosaic virus 35S RNA gene (CaMV35S), maize alcohol dehydrogenase (Adh1) and alpha Amy3.

[0269] In a mammalian host cell, such as CHO or HEK, useful promoters are obtained from Cytomegalovirus (CMV) and CAG hybrid promoter (hybrid of CMV early enhancer element and chicken beta-actin promoter), Simian vacuolating virus 40 (SV40).

[0270] The control sequence may also be a suitable transcription terminator sequence, which is recognized by a host cell to terminate transcription. The terminator sequence is operably linked to the 3′-terminus of the polynucleotide encoding the variant. Any terminator that is functional in the host cell may be used.

[0271] Preferred terminators for yeast host cells are obtained from the genes for Saccharomyces cerevisiae enolase, Saccharomyces cerevisiae cytochrome C (CYC1), Saccharomyces cerevisiae alcohol dehydrogenase (ADH1) and Saccharomyces cerevisiae glyceraldehyde-3-phosphate dehydrogenase. Other useful terminators for yeast host cells are described by Romanos et al., 1992, supra. Other useful terminators for yeast host cells are described by Romanos et al., 1992, supra. The skilled person knows useful terminators for use in rice and mammalian cells, such as CHO or HEK. For example, in a rice host, preferred terminators are obtained from Agrobacterium tumefaciens nopaline synthase (Nos) and cauliflower mosaic virus 35S RNA gene (CaMV35S)

[0272] The control sequence may also be a suitable leader sequence, a nontranslated region of an mRNA that is important for translation by the host cell. The leader sequence is operably linked to the 5′-terminus of the polynucleotide encoding the variant. Any leader sequence that is functional in the host cell may be used.

[0273] Suitable leaders for yeast host cells are obtained from the genes for Saccharomyces cerevisiae enolase (ENO-1), Saccharomyces cerevisiae 3-phosphoglycerate kinase, Saccharomyces cerevisiae alpha-factor, and Saccharomyces cerevisiae alcohol dehydrogenase/glyceraldehyde-3-phosphate dehydrogenase (ADH2/GAP).

[0274] The control sequence may also be a polyadenylation sequence, a sequence operably linked to the 3′-terminus of the variant-encoding sequence and, when transcribed, is recognized by the host cell as a signal to add polyadenosine residues to transcribed mRNA. Any polyadenylation sequence that is functional in the host cell may be used.

[0275] Useful polyadenylation sequences for yeast host cells are described by Guo and Sherman, 1995, Mol. Cellular Biol. 15: 5983-5990.

[0276] The control sequence may also be a signal peptide coding region that encodes a signal peptide linked to the N-terminus of a variant and directs the variant into the cell's secretory pathway. The 5′-end of the coding sequence of the polynucleotide may inherently contain a signal peptide coding region naturally linked in translation reading frame with the segment of the coding region that encodes the variant. Alternatively, the 5′-end of the coding sequence may contain a signal peptide coding region that is foreign to the coding sequence. The foreign signal peptide coding region may be required where the coding sequence does not naturally contain a signal peptide coding region. Alternatively, the foreign signal peptide coding region may simply replace the natural signal peptide coding region in order to enhance secretion of the variant. However, any signal peptide coding region that directs the expressed variant into the secretory pathway of a host cell may be used.

[0277] Useful signal peptides for yeast host cells are obtained from the genes for Saccharomyces cerevisiae alpha-factor and Saccharomyces cerevisiae invertase. Other useful signal peptide coding sequences are described by Romanos et al., 1992, supra. The skilled person knows useful signal peptides for use in rice and mammalian cells, such as CHO or HEK.

[0278] Where both signal peptide and propeptide regions are present at the N-terminus of a variant, the propeptide region is positioned next to the N-terminus of the variant and the signal peptide region is positioned next to the N-terminus of the propeptide region.

[0279] Further preferences for the fourth aspect of the invention are provided below the thirteenth aspect of the invention.

### Methods of Production

[0280] A fifth aspect of the invention relates to methods of preparation of a variant according to the invention. The variants of the invention can be prepared using techniques well known to the skilled person. One convenient way is by cloning nucleic acid encoding the parent albumin or a fragment thereof or fusion polypeptide comprising albumin or a fragment thereof, modifying said nucleic acid to introduce the desired substitution(s) at one or more (several) positions corresponding to positions 30 to 41, 75 to 91, 104 to 120, 144 to 150, 186 to 201, 414 to 426, 457 to 472, 492 to 538, 550 to 585, 276, 410 and/or 411 of the mature polypeptide of SEQ ID NO: 2, wherein, it is preferred that, when the polypeptide comprises one or more (several) alterations selected from (i) the group consisting of positions 417, 464, 492, 493, 494, 495, 496, 499, 500, 501, 503, 504, 505, 506, 510, 535, 536, 537, 538, 540, 550, 573, 574, 575, 577, 578, 579, 580, 581, 582 and 584, (ii) the group consisting of positions 34, 38, 40, 75, 76, 80, 82, 83, 86, 90, 91, 104, 113, 115, 116, 200, 461, 471, 496, 498, 501, 503, 504, 505, 506, 512, 514, 538, 550, 558, 559, 560, 562, 564, 565, 567, 573, 574, 577, 578, 579, 580, 581, 582, 584, 585 (particularly a substitution of one or more (several) of positions 34, 38, 40, 76, 80, 82, 83, 86, 104, 113, 115, 116, 471, 496, 498, 501, 503, 504, 505, 506, 512, 538, 550, 560, 562, 564, 565, 573, 574, 577, 578, 579, 580, 581, 582, 584, 585 from the native residue (e.g. non-Cys residue) to Cys and/or a deletion of or substitution of one or more (several) of positions 91, 200, 461, 514, 558, 559, 567 from Cys, to a non-Cys residue), or the group consisting of positions (iii) 63, 82, 84, 87, 90, 106, 114, 119, 146, 464, 201, 494, 501, 503, 505, 510, 513, 518, 525, 529, 533, 535, 536, 537, 550, 550, 557, 560, 563, 565, 570, 573, 574, 574, 584 (particularly one or more of (several) D63N, E82K, E84K, D87N, L90P, K106E, R114G, E119K, V146E, H464A, C201F, D494N, E501K, E503K, E505K, H510A, I513N, D518N, K525E, E529K, V533M, H535A, K536E, I537N, D550G, D550A, V557M, K560E, D563N, E565K, E570K, K573E, K574N, K574E, K584E); the polypeptide also comprises one or more (several) alterations at a position selected from group consisting of positions 30, 31, 32, 33, 34, 35, 36, 37, 38, 39, 40, 41, 75, 76, 77, 78, 79, 80, 81, 82, 83, 84, 85, 86, 87, 88, 89, 90, 91, 104, 105, 106, 107, 108, 109, 110, 111, 112, 113, 114, 115, 116, 117, 118, 119, 120, 144, 145, 146, 147, 148, 149, 150, 186, 187, 188, 189, 190, 191, 192, 193, 194, 195, 196, 197, 198, 199, 200, 201, 276, 410, 411, 414, 415, 416, 418, 419, 420, 421, 422, 423, 424, 425, 426, 457, 458, 459, 460, 461, 462, 463, 465, 466, 467, 468, 469, 470, 471, 472, 497, 498, 502, 507, 508, 509, 511, 512, 513, 514, 515, 516, 517, 518, 519, 520, 521, 522, 523, 524, 525, 526, 527, 528, 529, 530, 531, 532, 533, 534, 551, 552, 553, 554, 555, 556, 557, 558, 559, 560, 561, 562, 563, 564, 565, 567, 568, 569, 570, 571, 572, 576, 583, 585 and/or a stop codon inserted or substituted at a position selected from 497 to 585, preparing a suitable genetic construct where the modified nucleic acid is placed in operative connection with suitable regulatory genetic elements, such as promoter, terminator, activation sites, ribosome binding sites etc., introducing the genetic construct into a suitable host organism, culturing the transformed host organism under conditions leading to expression of the variant and recovering the variant. All these techniques are known in the art and it is within the skills of the average practitioner to design a suitable method for preparing a particular variant according to the invention.

[0281] The variant polypeptide of the invention may also be connected to a signal sequence in order to have the variant polypeptide secreted into the growth medium during culturing of the transformed host organism. It is generally advantageous to have the variant polypeptide secreted into the growth medium in order to ease recovery and purification.

[0282] Techniques for preparing variant polypeptides have also been disclosed in WO 2009019314 (included by reference) and these techniques may also be applied to the invention.

[0283] Albumins have been successfully expressed as recombinant proteins in a range of hosts including fungi (including but not limited to Aspergillus (WO06066595), Kluyveromyces (Fleer 1991, Bio/technology 9, 968-975), Pichia (Kobayashi 1998 Therapeutic Apheresis 2, 257-262) and Saccharomyces (Sleep 1990, Bio/technology 8, 42-46)), bacteria (Pandjaitab 2000, J. Allergy Clin. Immunol. 105, 279-285)), animals (Barash 1993, Transgenic Research 2, 266-276) and plants (including but not limited to potato and tobacco (Sijmons 1990, Bio/technology 8, 217 and Farran 2002, Transgenic Research 11, 337-346) and rice e.g. Oryza sativa) and mammalian cells such as CHO and HEK. The variant polypeptide of the invention is preferably produced recombinantly in a suitable host cell. In principle any host cell capable of producing a polypeptide in suitable amounts may be used and it is within the skills of the average practitioner to select a suitable host cell according to the invention. A preferred host organism is yeast, preferably selected among Saccharomycacae, more preferred Saccharomyces cerevisiae.

[0284] The variant polypeptides of the invention may be recovered and purified from the growth medium using a combination of known separation techniques such as filtration, centrifugation, chromatography, and affinity separation techniques etc. It is within the skills of the average practitioner to purify the variants of the invention using a particular combination of such known separation steps. As an example of purification techniques that may be applied to the variants of the invention can be mentioned the teaching of WO00/44772.

[0285] The variant polypeptides of the invention may be used for delivering a therapeutically beneficial compound (including prophylactically beneficial compound such as a vaccine) to an animal or a human individual in need thereof. Such therapeutically beneficial compounds include, but are not limited, to labels and readily detectable compounds for use in diagnostics, such as various imaging techniques; pharmaceutical active compounds such as drugs, or specifically binding moieties such as antibodies. The variants of the invention may even be connected to two or more (several) different therapeutically beneficial compounds, e.g., an antibody and a drug, which gives the combined molecule the ability to bind specifically to a desired target and thereby provide a high concentration of the connected drug at that particular target.

[0286] Further preferences for the fifth aspect of the invention are provided below the thirteenth aspect of the invention.

### Fusion Polypeptides

[0287] A sixth aspect of the invention relates to fusion polypeptides. Therefore, the variants of albumin or fragments thereof according to the invention may be fused with a non-albumin polypeptide fusion partner. The fusion partner may in principle be any polypeptide but generally it is preferred that the fusion partner is a polypeptide having therapeutic, prophylactic (including vaccine), diagnostic, imaging or other beneficial properties. Such properties may be referred to as ‘pharmaceutically beneficial properties’. Fusion polypeptides comprising albumin or fragments thereof are known in the art. It has been found that such fusion polypeptides comprising albumin or a fragment thereof and a fusion partner polypeptide have a longer plasma half-life compared to the unfused fusion partner polypeptide alone. According to the invention it is possible to alter the plasma half-life of the fusion polypeptides according to the invention compared to the corresponding fusion polypeptides of the prior art. ‘Alter’ includes both increasing the plasma half-life or decreasing the plasma half-life. Increasing the plasma half-life is preferred. The invention allows tailoring of half-life to a term desired.

[0288] One or more (several) therapeutic, prophylactic (including vaccine), diagnostic, imaging or other beneficial may be fused to the N-terminus, the C-terminus of albumin, inserted into a loop in the albumin structure or any combination thereof. It may or it may not comprise linker sequences separating the various components of the fusion polypeptide.

[0289] Teachings relating to fusions of albumin or a fragment thereof are known in the art and the skilled person will appreciate that such teachings can also be applied to the invention. WO 2001/79271A (particularly page 9 and/or Table 1), WO 2003/59934A (particularly Table 1), WO03/060071 (particularly Table 1) and WO01/079480 (particularly Table 1) (each incorporated herein by reference in their entirety) also contain examples of therapeutic, prophylactic (including vaccine), diagnostic, imaging or other beneficial polypeptides that may be fused to albumin or fragments thereof, and these examples apply also to the invention. Further preferences for the sixth aspect of the invention are provided below the thirteenth aspect of the invention.

### Conjugates

[0290] A seventh aspect of the invention relates to conjugates (conjugations). Therefore, the variants of albumin or fragments thereof according to the invention may be conjugated to a second molecule (‘conjugation partner’) using techniques known within the art. The conjugation partner may be a therapeutic, prophylactic (including vaccine), diagnostic, imaging or other beneficial moiety. Said conjugation partner may be a polypeptide or a non-polypeptide chemical. The conjugation partner may be a polypeptide, chemical (e.g. chemically synthesised drug) or a nucleic acid (e.g. DNA, RNA, siRNA).

[0291] Said second molecule may comprise a diagnostic or imaging moiety, and in this embodiment the conjugate may be useful as a diagnostic tool such as in imaging; or the second molecule may be a therapeutic or prophylactic (e.g. vaccine) compound and in this embodiment the conjugate may be used for therapeutic or prophylactic (e.g. vaccination) purposes where the conjugate will have the therapeutic or prophylactic properties of the therapeutic or prophylactic compound as well as the desirable plasma half-life provided by the albumin part of the conjugate. Conjugates of albumin and a therapeutic molecule are known in the art and it has been verified that such conjugates have long plasma half-life compared with the non-conjugated, free therapeutic molecule as such. According to the invention it is possible to alter the binding affinity to FcRn and/or plasma half-life of the conjugate according to the invention compared to the corresponding conjugates of the prior art. ‘Alter’ includes both increasing the plasma half-life and decreasing the plasma half-life binding affinity to FcRn and/or increasing the binding affinity and decreasing the binding affinity to FcRn. Increasing the plasma half-life and/or binding affinity to FcRn is preferred. The conjugates may conveniently be linked via a free thiol group present on the surface of HSA (amino acid residue 34 of mature HSA) using well known chemistry.

[0292] In one particular preferred aspect the variant albumin or fragment thereof is conjugated to a beneficial therapeutic or prophylactic (including vaccine) compound and the conjugate is used for treatment of a condition in a patient in need thereof, which condition is responsive to the particular selected therapeutic compound. Techniques for conjugating such a therapeutically useful compound to the variant albumin or fragment thereof are known in the art. WO 2009/019314 (incorporated herein by reference in its entirety) discloses examples of techniques suitable for conjugating a therapeutically compound to a polypeptide which techniques can also be applied to the invention. Further WO 2009/019314 discloses examples of compounds and moieties that may be conjugated to substituted transferrin and these examples may also be applied to the invention. The teaching of WO 2009/019314 is included herein by reference.

[0293] HSA contains in its natural form one free thiol group (at Cys34) that conveniently may be used for conjugation. As a particular embodiment within this aspect the variant albumin or fragment thereof may comprise further modifications provided to generate additional free thiol groups on the surface. This has the benefit that the payload of the variant albumin or fragment thereof is increased so that more than one molecule of the therapeutic (e.g. prophylactic) compound can be conjugated to each molecule of variant albumin or fragment thereof, or two or more (several) different therapeutic compounds may be conjugated to each molecule of variant albumin or fragment thereof, e.g., a compound having targeting properties such as an antibody specific for example a tumour; and a cytotoxic drug conjugated to the variant albumin or fragment thereof thereby creating a highly specific drug against a tumour. Teaching of particular residues that may be modified to provide for further free thiol groups on the surface can be found in co-pending patent application WO 2010/092135, which is incorporated by reference.

[0294] The conjugation partner may alternatively be conjugated to a fusion polypeptide (described herein), resulting in a molecule comprising a fusion partner fused to the albumin as well as a conjugation partner conjugated to the same albumin or even to the fusion partner.

[0295] Further preferences for the seventh aspect of the invention are provided below the thirteenth aspect of the invention.

### Associates

[0296] An eighth aspect of the invention relates to associates. Therefore, the variants of albumin or fragments thereof may further be used in form of “associates”. In this connection the term “associate” is intended to mean a compound comprising a variant of albumin or a fragment thereof and another compound bound or associated to the variant albumin or fragment thereof by non-covalent binding. As an example of such an associate can be mentioned an associate consisting variant albumin and a lipid associated to albumin by a hydrophobic interaction. Such associates are known in the art and they may be prepared using well known techniques. As an example of a preferred associate according to the invention can be mentioned an associate comprising variant albumin and a taxane, a taxol or taxol derivative (e.g. paclitaxel). Further examples of associates comprise a therapeutic, prophylactic (including vaccine), diagnostic, imaging or other beneficial moiety.

[0297] The half-life of an albumin associate according to the invention may be longer or shorter than the half-life of the ‘other compound’ alone. The half-life of an albumin associate according to the invention may be longer or shorter than the half-life of the analogous/equivalent albumin associate comprising or consisting of a reference albumin such as native HSA (instead of an albumin variant or derivative according to the invention) and the ‘other compound’. Likewise, the binding affinity to FcRn an albumin associate according to the invention may be stronger or weaker than the binding affinity to FcRn of the analogous/equivalent albumin associate comprising or consisting of a reference albumin such as native HSA (instead of an albumin variant or derivative according to the invention) and the ‘other compound’. Methods for the preparation of associates are well-known to the skilled person, for example, formulation (by association) of HSA with Lipo-compounds is described in Hussain, R. and Siligardi, G. (2006) International Journal of Peptide Research and Therapeutics, Vol. 12, NO: 3, pp. 311-315. Further preferences for the eighth aspect of the invention are provided below the thirteenth aspect of the invention.

### Other Uses

[0298] A ninth aspect of the invention relates to use of a variant albumin, fragment, fusion or conjugate thereof or nanoparticle or associate thereof. The variant albumin or fragments thereof or fusion polypeptides comprising variant albumin or fragments thereof according to the invention have the benefit that their binding affinity to FcRn and/or plasma half-life is altered compared to the parent or reference albumin or fragments thereof or fusion polypeptides comprising parent or reference albumin or fragments thereof. This has the advantage that the binding affinity to FcRn and/or plasma half-life of conjugates comprising variant albumin or a fragment thereof or fusion polypeptide comprising variant albumin or a fragment thereof, or an associate comprising variant albumin or a fragment thereof according to the invention can be selected in accordance with the particular therapeutic purpose.

[0299] For example for a conjugate, associate or fusion polypeptide used for imaging purposes in animals or human beings, where the imaging moiety has an very short half-life and a conjugate or a fusion polypeptide comprising HSA has a plasma half-life that is far longer than needed for the imaging purposes it would be advantageous to use a variant albumin or fragment thereof of the invention having a shorter plasma half-life than the parent or reference albumin or fragment thereof, to provide conjugates of fusion polypeptides having a plasma half-life that is sufficiently long for the imaging purpose but sufficiently short to be cleared form the body of the particular patient on which it is applied.

[0300] In another example for a conjugate, an associate or fusion polypeptide comprising a therapeutic compound effective to treat or alleviate a particular condition in a patient in need for such a treatment it would be advantageous to use the variant albumin or fragment thereof having a longer plasma half-life than the parent or reference albumin or fragment thereof, to provide associates or conjugates or fusion polypeptides having longer plasma half-lives which would have the benefit that the administration of the associate or conjugate or fusion polypeptide of the invention would be needed less frequently or reduced dose with less side effects compared to the situation where the parent or reference albumin or associates thereof or fragment thereof was used. For example, the invention provides a method of treating a proliferative disease in an individual, comprising administering the individual an effective amount of an associate according to the invention in which the associate comprises a taxane, a taxol or taxol derivative (e.g. paclitaxel).

[0301] In a further aspect the invention relates to compositions comprising the variant albumin, associates thereof or fragment thereof, variant albumin fragment or associates thereof or fusion polypeptide comprising variant albumin or fragment thereof according to the invention. The compositions are preferably pharmaceutical compositions. The composition may be prepared using techniques known in the area such as disclosed in recognized handbooks within the pharmaceutical field. Since the albumin, variant, fragment, fusion, conjugate or associate thereof has a binding affinity to FcRn and/or plasma half-life which is modulated (i.e. stronger or weaker and/or longer or shorter) than that of a reference molecule, the composition also has a binding affinity to FcRn and/or modulated plasma half-life relative to an equivalent composition comprising the reference molecule in place of the albumin, variant, fragment, fusion, conjugate or associate thereof as described herein. The composition may be a vaccine. The polypeptide according to the invention may be an active pharmaceutical or an excipient. Optionally, the composition is provided in unit dosage form.

[0302] Preferably the albumin, variant, fragment, fusion, conjugate or associate thereof has a plasma half-life that is longer than the plasma half-life of the reference molecule e.g. the same composition except that the albumin component (e.g. albumin, variant, fragment, fusion, conjugate or associate) is wild-type albumin (e.g. HSA) or a variant, fragment, fusion, conjugate or associate.

[0303] In a particular embodiment the compositions comprise a variant albumin or a fragment thereof according to the invention and a compound comprising a pharmaceutically beneficial moiety and an albumin binding domain (ABD). According to the invention ABD means a site, moiety or domain capable of binding to circulating albumin in vivo and thereby conferring transport in the circulation of the ABD and any compound or moiety bound to said ABD. ABD's are known in the art and have been shown to bind very tight to albumin so a compound comprising an ABD bound to albumin will to a certain extent behave as a single molecule. The inventors have realized by using the variant albumin or fragment thereof according to the invention together with a compound comprising a pharmaceutically beneficial moiety and an ABD makes it possible to alter the binding affinity to FcRn and/or plasma half-life of the compound comprising a pharmaceutically beneficial moiety and an ABD compared to the situation where said compound were injected as such in a patient having need thereof or administered in a formulation comprising natural albumin or a fragment thereof.

[0304] The variant albumin or fragments thereof, conjugates comprising variant albumin or a fragment thereof or fusion polypeptide comprising variant albumin or a fragment thereof, or an associate comprising variant albumin or a fragment thereof according to the invention may also be incorporated into nano- or microparticles using techniques well known within the art. A preferred method for preparing nano- or microparticles that may be applied to the variant albumins or fragments thereof according to the invention is disclosed in WO 2004/071536 or WO2008/007146 or Oner & Groves (Pharmaceutical Research, Vol 10(9), 1993, pages 1387 to 1388) which are incorporated herein by reference.

[0305] Further preferences for the ninth aspect of the invention are provided below the thirteenth aspect of the invention.

### Compositions

[0306] A tenth aspect of the invention relates to compositions. Therefore the invention is also directed to the use of a variant of albumin or a fragment thereof or fusion polypeptides comprising variant albumin or fragments thereof, or a conjugate comprising a variant of albumin or a fragment thereof, or an associate comprising a variant of albumin or a fragment thereof for the manufacture of a pharmaceutical composition, wherein the variant of albumin or a fragment thereof or fusion polypeptides comprising variant albumin or fragments thereof, or a conjugate comprising a variant of albumin or a fragment thereof, or an associate comprising a variant of albumin or a fragment thereof has an altered binding affinity to FcRn and/or an altered plasma half-life compared with HSA or the corresponding fragment thereof or fusion polypeptide comprising HSA or fragment thereof or conjugate comprising HSA.

[0307] In this connection the corresponding fragment of HSA is intended to mean a fragment of HSA that aligns with and has same number of amino acids as the fragment of the variant albumin with which it is compared. Similarly the corresponding fusion polypeptide comprising HSA or conjugate comprising HSA is intended to mean molecules having same size and amino acid sequence as the fusion polypeptide of conjugate comprising variant albumin, with which it is compared. Further preferences for the tenth aspect of the invention are provided below the thirteenth aspect of the invention.

### Nanoparticles

[0308] An eleventh aspect of the invention relates to a nanoparticle comprising a variant, fusion, conjugate, associate, nanoparticle, composition or polynucleotide as disclosed herein.

[0309] Techniques for incorporation of a molecule into nano- or microparticles are known in the art. Preferred methods for preparing nano- or microparticles that may be applied to the albumin, variant, fragment, fusion, conjugate or associate thereof according to the invention is disclosed in WO 2004/071536 or WO2008/007146 or Oner & Groves (Pharmaceutical Research, Vol 10(9), 1993, pages 1387 to 1388) which are incorporated herein by reference. Preferably the average diameter of a nano-particle is from 5 to 1000 nm, more preferably 5, 10, 20, 30, 40, 50, 80, 100, 130, 150, 200, 300, 400, 500, 600, 700, 800, 900, or 999 to 5, 10, 20, 30, 40, 50, 80, 100, 130, 150, 200, 300, 400, 500, 600, 700, 800, 900, or 1000 nm. An advantage of a microparticle less than 200 nm diameter, and more particularly less than 130 nm, is that is amenable to sterilisation by filtration through a 0.2 μm (micron) filter. Preferably, the average diameter of a micro-particle is from 1000 nm (1 μm (micron)) to 100 μm (micron), more preferably from 1, 2, 5, 10, 20, 30, 40, 50, 60, 70, 80, 90, 100 to 1, 2, 5, 10, 20, 30, 40, 50, 60, 70, 80, 90, 100 μm (micron).

[0310] Further preferences for the eleventh aspect of the invention are provided below the thirteenth aspect of the invention.

[0311] A twelfth aspect of the invention relates to use of a variant, fusion, conjugate, associate, nanoparticle, composition or polynucleotide as disclosed herein in a method of treatment or prophylaxis or diagnosis. In some situations, it would be advantageous to use an albumin, variant, fragment, fusion, conjugate or associate or composition thereof having a longer plasma half-life than the reference molecule or composition since this would have the benefit that the administration of the albumin, variant, fragment, fusion, conjugate or associate or composition thereof would be needed less frequently or at a reduced dose (and consequently with fewer side effects) compared to the situation where the reference molecule or composition was used. With respect to the use of a variant, fusion, conjugate, associate, nanoparticle, composition or polynucleotide the albumin moiety may comprise one more alterations as disclosed herein.

[0312] Further preferences for the twelfth aspect of the invention are provided below the thirteenth aspect of the invention.

[0313] A thirteenth aspect of the invention provides a method for altering the half-life of a molecule comprising:

[0314] (a) where the molecule is a polypeptide, fusing or conjugating the molecule to a polypeptide disclosed herein or to a conjugate disclosed herein; associating the molecule to a polypeptide disclosed herein or to a conjugate disclosed herein; incorporating the molecule in a nanoparticle disclosed herein or a composition disclosed herein;

[0315] (b) where the molecule is not a polypeptide, conjugating the molecule to a polypeptide disclosed herein or to a conjugate disclosed herein; associating the molecule to a polypeptide disclosed herein or to a conjugate a disclosed herein; incorporating the molecule in a nanoparticle disclosed herein or a composition disclosed herein.

[0316] Examples of ‘molecule’ include those useful in therapy, prophylaxis (including those used in vaccines either as an active pharmaceutical ingredient or as an excipient), imaging and diagnosis, such as those described herein.

[0317] Preferences for all aspects of the invention are provided below. The skilled person understands that any aspect of the invention may be combined with another aspect or aspects of the invention and/or with one or more (several) of the preferences for the aspects of the invention and/or other disclosures made herein.

[0318] The variant of albumin or a fragment thereof or fusion polypeptides comprising variant albumin or fragments thereof, fragment thereof, conjugate, nanoparticle, associate or composition may have a plasma half-life that is either longer or shorter, preferably longer, than the plasma half-life than a corresponding albumin or a fragment thereof or fusion polypeptides comprising albumin or fragments thereof, fragment thereof, conjugate, nanoparticle, associate or composition or a binding to FcRn that is stronger or weaker, preferably weaker. Preferably the variant of albumin or a fragment thereof or fusion polypeptides comprising variant albumin or fragments thereof, fragment thereof, conjugate, nanoparticle, associate or composition has a plasma half-life that is longer than the plasma half-life of HSA or the corresponding albumin or a fragment thereof or fusion polypeptides comprising albumin or fragments thereof, fragment thereof, conjugate, nanoparticle, associate or composition.

[0319] Alternatively, this may be expressed as the variant of albumin or a fragment thereof or fusion polypeptides comprising variant albumin or fragments thereof, fragment thereof, conjugate, nanoparticle, associate or composition having a KD to FcRn (e.g. shFcRn) that is lower that the corresponding KD for HSA to FcRn or the corresponding fragment thereof or fusion polypeptide comprising HSA or fragment thereof. Preferably, the KD for the variant of albumin or a fragment thereof or fusion polypeptides comprising variant albumin or fragments thereof, fragment thereof, conjugate, nanoparticle, associate or composition is less than 0.9×KD for HSA to FcRn, more preferred less than 0.5×KD for HSA to FcRn, more preferred less than 0.1×KD for HSA to FcRn, even more preferred less than 0.05×KD for HSA to FcRn, even more preferred less than 0.02×KD for HSA to FcRn and most preferred less than 0.01×KD for HSA to FcRn (where X means ‘multiplied by’). The KD of the variant of albumin or a fragment thereof or fusion polypeptides comprising variant albumin or fragments thereof, fragment thereof, conjugate, nanoparticle, associate or composition may be between the KD of WT albumin (e.g. SEQ ID No. 2) for FcRn and the KD of HSA K573P (SEQ ID No. 3) for FcRn. Such KDs represent binding affinities that are higher than the binding affinity between HSA and FcRn. A higher binding affinity indicates a longer half-life, for example plasma half-life.

[0320] Alternatively, the variant of albumin or a fragment thereof or fusion polypeptides comprising variant albumin or fragments thereof, fragment thereof, conjugate, nanoparticle, associate or composition has a plasma half-life that is shorter than the plasma half-life of HSA or the corresponding fragment thereof or fusion polypeptide comprising HSA or fragment thereof.

[0321] This may be expressed as the variant of albumin or a fragment thereof or fusion polypeptides comprising variant albumin or fragments thereof, fragment thereof, conjugate, nanoparticle, associate or composition having a KD to FcRn that is higher that the corresponding KD for HSA to FcRn or the corresponding of albumin or a fragment thereof or fusion polypeptides comprising albumin or fragments thereof, fragment thereof, conjugate, nanoparticle, associate or composition. Preferably, the KD for the variant of albumin or a fragment thereof or fusion polypeptides comprising variant albumin or fragments thereof, fragment thereof, or a conjugate comprising a variant of albumin or a fragment thereof is more than 2×KD for HSA to FcRn, more preferred more than 5×KD for HSA to FcRn, more preferred more than 10×KD for HSA to FcRn, even more preferred more than 25×KD for HSA to FcRn, even most preferred more than 50×KD for HSA to FcRn. The variant of albumin or a fragment thereof or fusion polypeptides comprising variant albumin or fragments thereof, fragment thereof, conjugate, nanoparticle, associate or composition may be a null binder to FcRn.

[0322] The variant of albumin or a fragment thereof or fusion polypeptides comprising variant albumin or fragments thereof, fragment thereof, or a conjugate or nanoparticle or associate or composition comprising a variant of albumin or a fragment thereof is preferably the variant of albumin or a fragment thereof or fusion polypeptides comprising variant albumin or fragments thereof, fragment thereof, or a conjugate or nanoparticle or associate or composition comprising a variant of albumin or a fragment thereof according to the invention. A lower binding affinity indicates a shorter half-life, for example plasma half-life.

[0323] One advantage of the invention is that it allows the half-life of albumin, a variant of albumin or a fragment thereof or fusion polypeptides comprising variant albumin or fragments thereof, fragment thereof, conjugate, nanoparticle, associate or composition to be tailored in order to achieve a binding affinity or half-life which meets the needs of the user.

[0324] When determining and/or comparing KD, one or more (and preferably all) of the following parameters may be used:

[0325] Instrument: Biacore 3000 instrument (GE Healthcare)

[0326] Flow cell: CM5 sensor chip

[0327] FcRn: human FcRn, preferably soluble human FcRn, optionally coupled to a tag such as GST

[0328] Quantity of FcRn: 1500-2500 RU

[0329] Coupling chemistry: amine coupling chemistry (e.g. as described in the protocol provided by the manufacturer of the instrument).

[0330] Coupling method: The coupling may be performed by injecting 10 μg/ml of the protein in 10 mM sodium acetate pH 5.0 (GE Healthcare). Phosphate buffer (67 mM phosphate buffer, 0.15 M NaCl, 0.005% Tween 20) at pH 6.0) may be used as running buffer and dilution buffer. Regeneration of the surfaces may be done using injections of HBS-EP buffer (0.01 M HEPES, 0.15 M NaCl, 3 mM EDTA, 0.005% surfactant P20) at pH 7.4 (Biacore AB).

[0331] Quantity of injection of test molecule (e.g. HSA or variant) 1.0-0.5 mM

[0332] Flow rate of injection: constant, e.g. 40 μl/ml

[0333] Temperature of injection: 25° C.

[0334] Data evaluation software: BIAevaluation 4.1 software (BIAcore AB).

[0335] The invention discloses positions in SEQ ID NO: 2 (and therefore equivalent positions in albumins and fragments from human serum and albumin and non-human serum albumins) which may be altered in order to modulate (increase of decrease) the binding affinity and/or half-life e.g. plasma half-life of an albumin, fragment, fusion, conjugate, associate, nanoparticle or composition. An alteration may be a substitution, insertion or deletion. Substitution is preferred.

[0336] A substitution or insertion may or may not comprise introduction of a conserved amino acid, i.e. conserved in relation to the amino acid at the position of interest. Examples of conserved amino acids are shown by the groups of FIG. 3: aliphatic, aromatic, hydrophobic, charged, polar, positive, tiny and small.

[0337] Preferred positions are those which interact with FcRn during binding and/or affect the interaction of the albumin, fragment, fusion, conjugate, associate, nanoparticle or composition with FcRn.

[0338] Preferred positions correspond to positions in SEQ ID NO: 2 selected from: (a) 492 to 538; (b) 505, 531, 524, 472, 108, 190, 197 and 425; (c) 186 to 201; (d) 457 to 472; (e) 414 to 426; (f) 104 to 120; (g) 75 to 91; (h) 144 to 150; (i) 30 to 41, (j) 550 to 585 and (k) 276, 410 and 414 with one or more (several) of A, C, D, E, F, G, H, I, K, L, M, N, P, Q, R, S, T, V, W, Y and/or a stop codon at a position from 497 to 585;

[0339] wherein, it is preferred that, when the polypeptide comprises one or more (several) alterations selected from (i) the group consisting of positions 417, 464, 492, 493, 494, 495, 496, 499, 500, 501, 503, 504, 505, 506, 510, 535, 536, 537, 538, 540, 550, 573, 574, 575, 577, 578, 579, 580, 581, 582 and 584, (ii) the group consisting of positions 34, 38, 40, 75, 76, 80, 82, 83, 86, 90, 91, 104, 113, 115, 116, 200, 461, 471, 496, 498, 501, 503, 504, 505, 506, 512, 514, 538, 550, 558, 559, 560, 562, 564, 565, 567, 573, 574, 577, 578, 579, 580, 581, 582, 584, 585 (particularly a substitution of one or more (several) of positions 34, 38, 40, 76, 80, 82, 83, 86, 104, 113, 115, 116, 471, 496, 498, 501, 503, 504, 505, 506, 512, 538, 550, 560, 562, 564, 565, 573, 574, 577, 578, 579, 580, 581, 582, 584, 585 from the native residue (e.g. non-Cys residue) to Cys and/or a deletion of or substitution of one or more (several) of positions 91, 200, 461, 514, 558, 559, 567 from Cys, to a non-Cys residue), and/or (iii) the group consisting of positions 63, 82, 84, 87, 90, 106, 114, 119, 146, 464, 201, 494, 501, 503, 505, 510, 513, 518, 525, 529, 533, 535, 536, 537, 550, 550, 557, 560, 563, 565, 570, 573, 574, 574, 584 (particularly one or more of (several) D63N, E82K, E84K, D87N, L90P, K106E, R114G, E119K, V146E, H464A, C201F, D494N, E501K, E503K, E505K, H510A, I513N, D518N, K525E, E529K, V533M, H535A, K536E, I537N, D550G, D550A, V557M, K560E, D563N, E565K, E570K, K573E, K574N, K574E, K584E); the polypeptide also comprises one or more (several) alterations at a position selected from group consisting of positions 30, 31, 32, 33, 34, 35, 36, 37, 38, 39, 40, 41, 75, 76, 77, 78, 79, 80, 81, 82, 83, 84, 85, 86, 87, 88, 89, 90, 91, 104, 105, 106, 107, 108, 109, 110, 111, 112, 113, 114, 115, 116, 117, 118, 119, 120, 144, 145, 146, 147, 148, 149, 150, 186, 187, 188, 189, 190, 191, 192, 193, 194, 195, 196, 197, 198, 199, 200, 201, 276, 410, 411, 414, 415, 416, 418, 419, 420, 421, 422, 423, 424, 425, 426, 457, 458, 459, 460, 461, 462, 463, 465, 466, 467, 468, 469, 470, 471, 472, 497, 498, 502, 507, 508, 509, 511, 512, 513, 514, 515, 516, 517, 518, 519, 520, 521, 522, 523, 524, 525, 526, 527, 528, 529, 530, 531, 532, 533, 534, 551, 552, 553, 554, 555, 556, 557, 558, 559, 560, 561, 562, 563, 564, 565, 567, 568, 569, 570, 571, 572, 576, 583, 585 and/or a stop codon inserted or substituted at a position selected from 497 to 585.

[0340] More preferred, when the polypeptide comprises one or more (several) alterations selected from (ii) the (ii) group consisting of positions 34, 38, 40, 75, 76, 80, 82, 83, 86, 90, 91, 104, 113, 115, 116, 200, 461, 471, 496, 498, 501, 503, 504, 505, 506, 512, 514, 538, 550, 558, 559, 560, 562, 564, 565, 567, 573, 574, 577, 578, 579, 580, 581, 582, 584, 585 (particularly a substitution of one or more (several) of positions 34, 38, 40, 76, 80, 82, 83, 86, 104, 113, 115, 116, 471, 496, 498, 501, 503, 504, 505, 506, 512, 538, 550, 560, 562, 564, 565, 573, 574, 577, 578, 579, 580, 581, 582, 584, 585 from the native residue (e.g. non-Cys residue) to Cys and/or a deletion of or substitution of one or more (several) of positions 91, 200, 461, 514, 558, 559, 567 from Cys, to a non-Cys residue), and/or (iii) the group consisting of positions 63, 82, 84, 87, 90, 106, 114, 119, 146, 464, 201, 494, 501, 503, 505, 510, 513, 518, 525, 529, 533, 535, 536, 537, 550, 550, 557, 560, 563, 565, 570, 573, 574, 574, 584 (particularly one or more of (several) D63N, E82K, E84K, D87N, L90P, K106E, R114G, E119K, V146E, H464A, C201F, D494N, E501K, E503K, E505K, H510A, I513N, D518N, K525E, E529K, V533M, H535A, K536E, I537N, D550G, D550A, V557M, K560E, D563N, E565K, E570K, K573E, K574N, K574E, K584E); the polypeptide also comprises one or more (several) alterations at a position selected from group consisting of positions 30, 31, 32, 33, 35, 36, 37, 39, 41, 77, 78, 79, 81, 84, 85, 87, 88, 89, 105, 106, 107, 108, 109, 110, 111, 112, 117, 118, 120, 144, 145, 146, 147, 148, 149, 150, 186, 187, 188, 189, 190, 191, 192, 193, 194, 195, 196, 197, 198, 199, 201, 276, 410, 411, 414, 415, 416, 418, 419, 420, 421, 422, 423, 424, 425, 426, 457, 458, 459, 460, 462, 463, 465, 466, 467, 468, 469, 470, 472, 497, 502, 507, 508, 509, 511, 513, 515, 516, 517, 518, 519, 520, 521, 522, 523, 524, 525, 526, 527, 528, 529, 530, 531, 532, 534, 551, 552, 553, 554, 555, 556, 557, 561, 568, 569, 570, 571, 572, 576, 583 and/or a stop codon inserted or substituted at a position selected from 497 to 585.

[0341] According to the invention, it is preferred that when an albumin variant comprises an alteration selected from D63N, E82K, E84K, D87N, L90P, K106E, R114G, E119K, V146E, H464A, C201F, D494N, E501K, E503K, E505K, H510A, I513N, D518N, K525E, E529K, V533M, H535A, K536E, I537N, D550G, D550A, V557M, K560E, D563N, E565K, E570K, K573E, K574N, K574E, K584E, then the alteration is provided in combination with one or more (several) alterations described herein. Other alterations at one or more (several) of positions 63, 82, 84, 87, 90, 106, 114, 119, 146, 464, 201, 494, 501, 503, 505, 510, 513, 518, 525, 529, 533, 535, 536, 537, 550, 550, 557, 560, 563, 565, 570, 573, 574, 574, 584 may or may not be provided in combination with one or more (several) alterations described herein.

[0342] A stop codon may introduced at any of positions 497 to 585, i.e. any of positions 497, 498, 499, 500, 501, 502, 503, 504, 505, 506, 507, 508, 509, 510, 511, 512, 513, 514, 515, 516, 517, 518, 519, 520, 521, 522, 523, 524, 525, 526, 527, 528, 529, 530, 531, 532, 533, 534, 535, 536, 537, 538, 539, 540, 541, 542, 543, 544, 545, 546, 547, 548, 549, 550, 551, 552, 553, 554, 555, 556, 557, 558, 559, 560, 561, 562, 563, 564, 565, 566, 567, 568, 569, 570, 571, 572, 573, 574, 575, 576, 577, 578, 579, 580, 581, 582, 583, 584, 585, more preferably from 570 to 585 (or equivalent position, relative to SEQ ID NO: 2). The introduction may be made by insertion or substitution. Introduction of such a stop codon may be in addition to or instead of an alteration described herein.

[0343] For insertion of one or more (several) amino acids to the N-side (“X-1”) of an amino acid at a position selected from the group consisting of positions 417, 464, 492, 493, 494, 495, 496, 499, 500, 501, 503, 504, 505, 506, 510, 535, 536, 537, 538, 540, 550, 573, 574, 575, 577, 578, 579, 580, 581, 582 and 584, there may or may not be an additional alteration selected from the group consisting of positions 30, 31, 32, 33, 34, 35, 36, 37, 38, 39, 40, 41, 75, 76, 77, 78, 79, 80, 81, 82, 83, 84, 85, 86, 87, 88, 89, 90, 91, 104, 105, 106, 107, 108, 109, 110, 111, 112, 113, 114, 115, 116, 117, 118, 119, 120, 144, 145, 146, 147, 148, 149, 150, 186, 187, 188, 189, 190, 191, 192, 193, 194, 195, 196, 197, 198, 199, 200, 201, 276, 410, 411, 414, 415, 416, 418, 419, 420, 421, 422, 423, 424, 425, 426, 457, 458, 459, 460, 461, 462, 463, 465, 466, 467, 468, 469, 470, 471, 472, 497, 498, 502, 507, 508, 509, 511, 512, 513, 514, 515, 516, 517, 518, 519, 520, 521, 522, 523, 524, 525, 526, 527, 528, 529, 530, 531, 532, 533, 534, 551, 552, 553, 554, 555, 556, 557, 558, 559, 560, 561, 562, 563, 564, 565, 567, 568, 569, 570, 571, 572, 576, 583, 585 and/or a stop codon inserted or substituted at a position selected from 497 to 585.

[0344] Conversely, for insertion of one or more (several) amino acids to the C-side (“X+1”) of an amino acid at a position selected from the group consisting of positions 417, 464, 492, 493, 494, 495, 496, 499, 500, 501, 503, 504, 505, 506, 510, 535, 536, 537, 538, 540, 550, 573, 574, 575, 577, 578, 579, 580, 581, 582 and 584, it is preferred that there is an additional alteration selected from the group consisting of positions 30, 31, 32, 33, 34, 35, 36, 37, 38, 39, 40, 41, 75, 76, 77, 78, 79, 80, 81, 82, 83, 84, 85, 86, 87, 88, 89, 90, 91, 104, 105, 106, 107, 108, 109, 110, 111, 112, 113, 114, 115, 116, 117, 118, 119, 120, 144, 145, 146, 147, 148, 149, 150, 186, 187, 188, 189, 190, 191, 192, 193, 194, 195, 196, 197, 198, 199, 200, 201, 276, 410, 411, 414, 415, 416, 418, 419, 420, 421, 422, 423, 424, 425, 426, 457, 458, 459, 460, 461, 462, 463, 465, 466, 467, 468, 469, 470, 471, 472, 497, 498, 502, 507, 508, 509, 511, 512, 513, 514, 515, 516, 517, 518, 519, 520, 521, 522, 523, 524, 525, 526, 527, 528, 529, 530, 531, 532, 533, 534, 551, 552, 553, 554, 555, 556, 557, 558, 559, 560, 561, 562, 563, 564, 565, 567, 568, 569, 570, 571, 572, 576, 583, 585 and/or a stop codon inserted or substituted at a position selected from 497 to 585.

[0345] An amino acid residue of HSA interacting with FcRn is considered to be any amino acid residues of HSA being located less than 10 Å (for example less than 5 Å) from an amino acid in the FcRn or any amino acid residue that is involved in a hydrogen bond, a salt bridge or a polar or nonpolar interaction with an amino acid residue that is located less than 10 Å from an amino acid in the FcRn. Preferably the amino acid in HSA residues are located less than 10 Å from amino acids in the FcRn, more preferred less than 6 Å from amino acids in the FcRn and most preferred less than 3 Å from amino acids in the FcRn.

[0346] Preferably the amino acids residues of albumin which affect the binding of the albumin to FcRn are located in the binding surface, such as a binding surface defined in FIG. 9 (pink (in grey-scale this is seen as the darkest (almost black) region)). The amino acids may be in a part of the binding surface provided by domain I or in a part of the binding surface provided by domain III of albumin.

[0347] Therefore the one or more (several) alterations may be in domain I, e.g. at positions selected from the group consisting of 30 to 41, 75 to 91, 104 to 120, 144 to 150, 186 to 201. The one or more alterations may be in domain II, e.g. position 276. The one or more alterations may be in domain III, e.g. at positions selected from the group consisting of 414 to 426, 457 to 472, 492-538, 550 to 585.

Positions 83, 108, 109, 110, 111, 112, 105 to 120, 190, 197, 425, 472, 505, 510, 524, 527, 531, 534, are particularly preferred.

[0348] Advantageously, the polypeptide retains substantially the same tertiary structure (or, for a fragment, the relevant part of the structure) as a reference or parent albumin such as HSA. The skilled person understand the term ‘substantially the same tertiary structure’ bearing in mind that some degree of variation in tertiary structure is expected as all proteins have some degree of structural flexibility. This applies particularly to polypeptides have a higher binding affinity to FcRn than the parent or reference albumin (e.g. HSA) has to FcRn.

[0349] One or more of the His residues may or may not be maintained relative to the parent albumin. For example, with reference to SEQ ID NO: 2, one or more of the following His residues may be maintained: 3, 9, 39, 67, 105, 128, 146, 242, 247, 288, 338, 367, 440, 464, 510, 535. One or more, preferably all, of the His residues in domain I are maintained (i.e. 3, 9, 39, 67, 105, 128, 146.). One or more, preferably all, of the His residues in domain II are maintained (i.e. 242, 247, 288, 338, 367). One or more, preferably all, of the His residues in domain III are maintained (i.e. 440, 464, 510, 535). One or more or all three of His 464, 510, 535 may be maintained.

[0350] It is preferred that at least 1, 2, 3, 4, 5, 6, 7, 8, 9, 10, 11, 12, 13, 14, 15, 16 or 17 of the disulphide bonds of the albumin are maintained in the polypeptide. For a polypeptide derived from a full length albumin, it is preferred that all disulphide bonds usually present in that albumin are maintained. For a polypeptide derived from a fragment of albumin, it is preferred that all disulphide bonds usually present in that fragment are maintained. It is preferred that Cys-34 (or equivalent in non-human albumins) is maintained.

[0351] When the alteration is at a position selected from one or more (several) of 75, 90, 91, 200, 461, 514, 558, 559 and 567, it is preferred that there is also one or more (several) alterations at a position selected from group consisting of 30, 31, 32, 33, 34, 35, 36, 37, 38, 39, 40, 41, 75, 76, 77, 78, 79, 80, 81, 82, 83, 84, 85, 86, 87, 88, 89, 90, 91, 104, 105, 106, 107, 108, 109, 110, 111, 112, 113, 114, 115, 116, 117, 118, 119, 120, 144, 145, 146, 147, 148, 149, 150, 186, 187, 188, 189, 190, 191, 192, 193, 194, 195, 196, 197, 198, 199, 200, 201, 276, 410, 411, 414, 415, 416, 418, 419, 420, 421, 422, 423, 424, 425, 426, 457, 458, 459, 460, 461, 462, 463, 465, 466, 467, 468, 469, 470, 471, 472, 497, 498, 502, 507, 508, 509, 511, 512, 513, 514, 515, 516, 517, 518, 519, 520, 521, 522, 523, 524, 525, 526, 527, 528, 529, 530, 531, 532, 533, 534, 551, 552, 553, 554, 555, 556, 557, 558, 559, 560, 561, 562, 563, 564, 565, 567, 568, 569, 570, 571, 572, 576, 583, 585 and/or a stop codon inserted or substituted at a position selected from 497 to 585.

For a polypeptide, particularly a polypeptide comprising a single alteration, it is preferred that an alteration does not comprise substitution with a Cys, insertion of a Cys and/or deletion of a residue which disrupts a disulphide bond and therefore provides an additional conjugatable Cys within the polypeptide. It is particularly preferred that the alteration(s) at one or more (several) of positions 75, 90, 91, 200, 461, 514, 558, 559 and 567 is not a substitution from Cys to any other amino acid (A, D, E, F, G, H, I, K, L, M, N, P, Q, R, S, T, V, W, Y), is not deletion of the Cys, is not substitution or deletion of the disulphide binding partner of that Cys, therefore preferably Cys at one more of positions 53, 62, 75, 90, 91, 101, 124, 168, 169, 177, 200, 245, 246, 253, 265, 278, 279, 289, 316, 360, 361, 369, 392, 437, 438, 448, 461, 476, 477, 487, 514, 558, 559, 567 are not deleted, substituted and/or subjected to an insertion. Most preferably, no Cys usually involved in disulphide binding is deleted, substituted and/or subjected to an insertion. Therefore, it is preferred that if an alteration is at one or more (several) of positions 34, 38, 40, 76, 79, 80, 82, 83, 86, 104, 113, 115, 116, 471, 490, 496, 498, 501, 503, 504, 505, 506, 512, 538, 542, 550, 560, 562, 564, 565, 573, 574, 577, 578, 579, 580, 581, 582, 584, 585, the alteration is not a substitution to Cys and/or an insertion of a Cys.

[0352] For all aspects of the invention, it is preferred that position 573 (or equivalent thereof) is a Pro, Trp or Tyr residue. Therefore, when there are 2 or more (several) alterations, it is preferred that position 573 (or equivalent thereof) is Pro, Trp or Tyr.

[0353] For all aspects of the invention fusion partner polypeptides and/or conjugates may comprise one or more (several) of: 4-1BB ligand, 5-helix, A human C-C chemokine, A human L105 chemokine, A human L105 chemokine designated huL105_3., A monokine induced by gamma-interferon (MIG), A partial CXCR4B protein, A platelet basic protein (PBP), al-antitrypsin, ACRP-30 Homologue; Complement Component C1q C, Adenoid-expressed chemokine (ADEC), aFGF; FGF-1, AGF, AGF Protein, albumin, an etoposide, angiostatin, Anthrax vaccine, Antibodies specific for collapsin, antistasin, Anti-TGF beta family antibodies, antithrombin III, APM-1; ACRP-30; Famoxin, apo-lipoprotein species, Arylsulfatase B, b57 Protein, BCMA, Beta-thromboglobulin protein (beta-TG), bFGF; FGF2, Blood coagulation factors, BMP Processing Enzyme Furin, BMP-10, BMP-12, BMP-15, BMP-17, BMP-18, BMP-2B, BMP-4, BMP-5, BMP-6, BMP-9, Bone Morphogenic Protein-2, calcitonin, Calpain-10a, Calpain-10b, Calpain-10c, Cancer Vaccine, Carboxypeptidase, C-C chemokine, MCP2, CCR5 variant, CCR7, CCR7, CD11a Mab, CD137; 4-1BB Receptor Protein, CD20 Mab, CD27, CD27L, CD30, CD30 ligand, CD33 immunotoxin, CD40, CD40L, CD52 Mab, Cerebus Protein, Chemokine Eotaxin., Chemokine hIL-8, Chemokine hMCP1, Chemokine hMCP1a, Chemokine hMCP1b, Chemokine hMCP2, Chemokine hMCP3, Chemokine hSDF1b, Chemokine MCP-4, chemokine TECK and TECK variant, Chemokine-like protein IL-8M1 Full-Length and Mature, Chemokine-like protein IL-8M10 Full-Length and Mature, Chemokine-like protein IL-8M3, Chemokine-like protein IL-8M8 Full-Length and Mature, Chemokine-like protein IL-8M9 Full-Length and Mature, Chemokine-like protein PF4-414 Full-Length and Mature, Chemokine-like protein PF4-426 Full-Length and Mature, Chemokine-like protein PF4-M2 Full-Length and Mature, Cholera vaccine, Chondromodulin-like protein, c-kit ligand; SCF; Mast cell growth factor; MGF; Fibrosarcoma-derived stem cell factor, CNTF and fragment thereof (such as CNTFAx15′(Axokine™)), coagulation factors in both pre and active forms, collagens, Complement C5 Mab, Connective tissue activating protein-III, CTAA16.88 Mab, CTAP-III, CTLA4-Ig, CTLA-8, CXC3, CXC3, CXCR3; CXC chemokine receptor 3, cyanovirin-N, Darbepoetin, designated exodus, designated huL105_7., DIL-40, DNase, EDAR, EGF Receptor Mab, ENA-78, Endostatin, Eotaxin, Epithelial neutrophil activating protein-78, EPO receptor; EPOR, erythropoietin (EPO) and EPO mimics, Eutropin, Exodus protein, Factor IX, Factor VII, Factor VIII, Factor X and Factor XIII, FAS Ligand Inhibitory Protein (DcR3), FasL, FasL, FasL, FGF, FGF-12; Fibroblast growth factor homologous factor-1, FGF-15, FGF-16, FGF-18, FGF-3; INT-2, FGF-4; gelonin, HST-1; HBGF-4, FGF-5, FGF-6; Heparin binding secreted transforming factor-2, FGF-8, FGF-9; Glia activating factor, fibrinogen, flt-1, flt-3 ligand, Follicle stimulating hormone Alpha subunit, Follicle stimulating hormone Beta subunit, Follitropin, Fractalkine, fragment. myofibrillar protein Troponin I, FSH, Galactosidase, Galectin-4, G-CSF, GDF-1, Gene therapy, Glioma-derived growth factor, glucagon, glucagon-like peptides, Glucocerebrosidase, glucose oxidase, Glucosidase, Glycodelin-A; Progesterone-associated endometrial protein, GM-CSF, gonadotropin, Granulocyte chemotactic protein-2 (GCP-2), Granulocyte-macrophage colony stimulating factor, growth hormone, Growth related oncogene-alpha (GRO-alpha), Growth related oncogene-beta (GRO-beta), Growth related oncogene-gamma (GRO-gamma), hAPO-4; TROY, hCG, Hepatitis B surface Antigen, Hepatitis B Vaccine, HER2 Receptor Mab, hirudin, HIV gp120, HIV gp41, HIV Inhibitor Peptide, HIV Inhibitor Peptide, HIV Inhibitor Peptide, HIV protease inhibiting peptides, HIV-1 protease inhibitors, HPV vaccine, Human 6CKine protein, Human Act-2 protein, Human adipogenesis inhibitory factor, human B cell stimulating factor-2 receptor, Human beta-chemokine H1305 (MCP-2), Human C-C chemokine DGWCC, Human CC chemokine ELC protein, Human CC type chemokine interleukin C, Human CCC3 protein, Human CCF18 chemokine, Human CC-type chemokine protein designated SLC (secondary lymphoid chemokine), Human chemokine beta-8 short forms, Human chemokine C10, Human chemokine CC-2, Human chemokine CC-3, Human chemokine CCR-2, Human chemokine Ckbeta-7, Human chemokine ENA-78, Human chemokine eotaxin, Human chemokine GRO alpha, Human chemokine GROalpha, Human chemokine GRObeta, Human chemokine HCC-1, Human chemokine HCC-1, Human chemokine 1-309, Human chemokine IP-10, Human chemokine L105_3, Human chemokine L105_7, Human chemokine MIG, Human chemokine MIG-beta protein, Human chemokine MIP-1alpha, Human chemokine MIP1beta, Human chemokine MIP-3alpha, Human chemokine MIP-3beta, Human chemokine PF4, Human chemokine protein 331D5, Human chemokine protein 61164, Human chemokine receptor CXCR3, Human chemokine SDF1alpha, Human chemokine SDF1beta, Human chemokine ZSIG-35, Human Chr19Kine protein, Human CKbeta-9, Human CKbeta-9, Human CX3C 111 amino acid chemokine, Human DNAX interleukin-40, Human DVic-1 C-C chemokine, Human EDIRF I protein sequence, Human EDIRF II protein sequence, Human eosinocyte CC type chemokine eotaxin, Human eosinophil-expressed chemokine (EEC), Human fast twitch skeletal muscle troponin C, Human fast twitch skeletal muscle troponin I, Human fast twitch skeletal muscle Troponin subunit C, Human fast twitch skeletal muscle Troponin subunit I Protein, Human fast twitch skeletal muscle Troponin subunit T, Human fast twitch skeletal muscle troponin T, Human foetal spleen expressed chemokine, FSEC, Human GM-CSF receptor, Human gro-alpha chemokine, Human gro-beta chemokine, Human gro-gamma chemokine, Human IL-16 protein, Human IL-1RD10 protein sequence, Human IL-1RD9, Human IL-5 receptor alpha chain, Human IL-6 receptor, Human IL-8 receptor protein hIL8RA, Human IL-8 receptor protein hIL8RB, Human IL-9 receptor protein, Human IL-9 receptor protein variant #3, Human IL-9 receptor protein variant fragment, Human IL-9 receptor protein variant fragment#3, Human interleukin 1 delta, Human Interleukin 10, Human Interleukin 10, Human interleukin 18, Human interleukin 18 derivatives, Human interleukin-1 beta precursor, Human interleukin-1 beta precursor., Human interleukin-1 receptor accessory protein, Human interleukin-1 receptor antagonist beta, Human interleukin-1 type-3 receptor, Human Interleukin-10 (precursor), Human Interleukin-10 (precursor), Human interleukin-11 receptor, Human interleukin-12 40 kD subunit, Human interleukin-12 beta-1 receptor, Human interleukin-12 beta-2 receptor, Human Interleukin-12 p35 protein, Human Interleukin-12 p40 protein, Human interleukin-12 receptor, Human interleukin-13 alpha receptor, Human interleukin-13 beta receptor, Human interleukin-15, Human interleukin-15 receptor from clone P1, Human interleukin-17 receptor, Human interleukin-18 protein (IL-18), Human interleukin-3, human interleukin-3 receptor, Human interleukin-3 variant, Human interleukin-4 receptor, Human interleukin-5, Human interleukin-6, Human interleukin-7, Human interleukin-7., Human interleukin-8 (IL-8), Human intracellular IL-1 receptor antagonist, Human IP-10 and HIV-1 gp120 hypervariable region fusion protein, Human IP-10 and human Muc-1 core epitope (VNT) fusion protein, human liver and activation regulated chemokine (LARC), Human Lkn-1 Full-Length and Mature protein, Human mammary associated chemokine (MACK) protein Full-Length and Mature, Human mature chemokine Ckbeta-7, Human mature gro-alpha, Human mature gro-gamma polypeptide used to treat sepsis, Human MCP-3 and human Muc-1 core epitope (VNT) fusion protein, Human MI10 protein, Human MI1A protein, Human monocyte chemoattractant factor hMCP-1, Human monocyte chemoattractant factor hMCP-3, Human monocyte chemotactic proprotein (MCPP) sequence, Human neurotactin chemokine like domain, Human non-ELR CXC chemokine H174, Human non-ELR CXC chemokine IP10, Human non-ELR CXC chemokine Mig, Human PAI-1 mutants, Human protein with IL-16 activity, Human protein with IL-16 activity, Human secondary lymphoid chemokine (SLC), Human SISD protein, Human STCP-1, Human stromal cell-derived chemokine, SDF-1, Human T cell mixed lymphocyte reaction expressed chemokine (TMEC), Human thymus and activation regulated cytokine (TARC), Human thymus expressed, Human TNF-alpha, Human TNF-alpha, Human TNF-beta (LT-alpha), Human type CC chemokine eotaxin 3 protein sequence, Human type II interleukin-1 receptor, Human wild-type interleukin-4 (hIL-4) protein, Human ZCHEMO-8 protein, Humanized Anti-VEGF Antibodies, and fragments thereof, Humanized Anti-VEGF Antibodies, and fragments thereof, Hyaluronidase, ICE 10 kD subunit., ICE 20 kD subunit., ICE 22 kD subunit., Iduronate-2-sulfatase, Iduronidase, IL-1 alpha, IL-1 beta, IL-1 inhibitor (IL-1i)., IL-1 mature, IL-10 receptor, IL-11, IL-11, IL-12 p40 subunit., IL-13, IL-14, IL-15, IL-15 receptor, IL-17, IL-17 receptor, 11-17 receptor, 11-17 receptor, IL-19, IL-1i fragments, IL1-receptor antagonist, IL-21 (TIF), IL-3 containing fusion protein., IL-3 mutant proteins, IL-3 variants, IL-3 variants, IL-4, IL-4 mutein, IL-4 mutein Y124G, IL-4 mutein Y124X, IL-4 muteins, 11-5 receptor, IL-6, 11-6 receptor, IL-7 receptor clone, IL-8 receptor, IL-9 mature protein variant (Met117 version), immunoglobulins or immunoglobulin-based molecules or fragment of either (e.g. a Small Modular ImmunoPharmaceutical™ (“SMIP”) or dAb, Fab′ fragments, F(ab′)2, scAb, scFv or scFv fragment), including but not limited to plasminogen, Influenza Vaccine, Inhibin alpha, Inhibin beta, insulin, insulin-like growth factor, Integrin Mab, inter-alpha trypsin inhibitor, inter-alpha trypsin inhibitor, Interferon gamma-inducible protein (IP-10), interferons (such as interferon alpha species and sub-species, interferon beta species and sub-species, interferon gamma species and sub-species), interferons (such as interferon alpha species and sub-species, interferon beta species and sub-species, interferon gamma species and sub-species), Interleukin 6, Interleukin 8 (IL-8) receptor, Interleukin 8 receptor B, Interleukin-1alpha, Interleukin-2 receptor associated protein p43, interleukin-3, interleukin-4 muteins, Interleukin-8 (IL-8) protein., interleukin-9, Interleukin-9 (IL-9) mature protein (Thr117 version), interleukins (such as 11_10, IL11 and IL2), interleukins (such as IL10, IL11 and IL2), Japanese encephalitis vaccine, Kalikrein Inhibitor, Keratinocyte growth factor, Kunitz domain protein (such as aprotinin, amyloid precursor protein and those described in WO 03/066824, with or without albumin fusions), Kunitz domain protein (such as aprotinin, amyloid precursor protein and those described in WO 03/066824, with or without albumin fusions), LACI, lactoferrin, Latent TGF-beta binding protein II, leptin, Liver expressed chemokine-1 (LVEC-1), Liver expressed chemokine-2 (LVEC-2), LT-alpha, LT-beta, Luteinization Hormone, Lyme Vaccine, Lymphotactin, Macrophage derived chemokine analogue MDC (n+1), Macrophage derived chemokine analogue MDC-eyfy, Macrophage derived chemokine analogue MDC-yl, Macrophage derived chemokine, MDC, Macrophage-derived chemokine (MDC), Maspin; Protease Inhibitor 5, MCP-1 receptor, MCP-1a, MCP-1b, MCP-3, MCP-4 receptor, M-CSF, Melanoma inhibiting protein, Membrane-bound proteins, Met117 human interleukin 9, MIP-3 alpha, MIP-3 beta, MIP-Gamma, MIRAP, Modified Rantes, monoclonal antibody, MP52, Mutant Interleukin 6 S176R, myofibrillar contractile protein Troponin I, Natriuretic Peptide, Nerve Growth Factor-beta, Nerve Growth Factor-beta2, Neuropilin-1, Neuropilin-2, Neurotactin, Neurotrophin-3, Neurotrophin-4, Neurotrophin-4a, Neurotrophin-4b, Neurotrophin-4c, Neurotrophin-4d, Neutrophil activating peptide-2 (NAP-2), NOGO-66 Receptor, NOGO-A, NOGO-B, NOGO-C, Novel beta-chemokine designated PTEC, N-terminal modified chemokine GroHEK/hSDF-1alpha, N-terminal modified chemokine GroHEK/hSDF-1beta., N-terminal modified chemokine met-hSDF-1 alpha, N-terminal modified chemokine met-hSDF-1 beta, OPGL, Osteogenic Protein-1; OP-1; BMP-7, Osteogenic Protein-2, OX40; ACT-4, OX40L, Oxytocin (Neurophysin I), parathyroid hormone, Patched, Patched-2, PDGF-D, Pertussis toxoid, Pituitary expressed chemokine (PGEC), Placental Growth Factor, Placental Growth Factor-2, Plasminogen Activator Inhibitor-1; PAI-1, Plasminogen Activator Inhibitor-2; PAI-2, Plasminogen Activator Inhibitor-2; PAI-2, Platelet derived growth factor, Platelet derived growth factor Bv-sis, Platelet derived growth factor precursor A, Platelet derived growth factor precursor B, Platelet Mab, platelet-derived endothelial cell growth factor (PD-ECGF), Platelet-Derived Growth Factor A chain, Platelet-Derived Growth Factor B chain, polypeptide used to treat sepsis, Preproapolipoprotein “milano” variant, Preproapolipoprotein “paris” variant, pre-thrombin, Primate CC chemokine “ILINCK”, Primate CXC chemokine “IBICK”, proinsulin, Prolactin, Prolactin2, prosaptide, Protease inhibitor peptides, Protein C, Protein S, pro-thrombin, prourokinase, RANTES, RANTES 8-68, RANTES 9-68, RANTES peptide, RANTES receptor, Recombinant interleukin-16, Resistin, restrictocin, Retroviral protease inhibitors, ricin, Rotavirus Vaccine, RSV Mab, saporin, sarcin, Secreted and Transmembrane polypeptides, Secreted and Transmembrane polypeptides, serum cholinesterase, serum protein (such as a blood clotting factor), Soluble BMP Receptor Kinase Protein-3, Soluble VEGF Receptor, Stem Cell Inhibitory Factor, Staphylococcus Vaccine, Stromal Derived Factor-1 alpha, Stromal Derived Factor-1 beta, Substance P (tachykinin), T1249 peptide, T20 peptide, T4 Endonuclease, TACI, Tarc, TGF-beta 1, TGF-beta 2, Thr117 human interleukin 9, thrombin, thrombopoietin, Thrombopoietin derivative1, Thrombopoietin derivative2, Thrombopoietin derivative3, Thrombopoietin derivative4, Thrombopoietin derivative5, Thrombopoietin derivative6, Thrombopoietin derivative7, Thymus expressed chemokine (TECK), Thyroid stimulating Hormone, tick anticoagulant peptide, Tim-1 protein, TNF-alpha precursor, TNF-R, TNF-RII; TNF p75 Receptor; Death Receptor, tPA, transferrin, transforming growth factor beta, Troponin peptides, Truncated monocyte chemotactic protein 2 (6-76), Truncated monocyte chemotactic protein 2 (6-76), Truncated RANTES protein (3-68), tumour necrosis factor, Urate Oxidase, urokinase, Vasopressin (Neurophysin II), VEGF R-3; flt-4, VEGF Receptor; KDR; flk-1, VEGF-110, VEGF-121, VEGF-138, VEGF-145, VEGF-162, VEGF-165, VEGF-182, VEGF-189, VEGF-206, VEGF-D, VEGF-E; VEGF-X, von Willebrand's factor, Wild type monocyte chemotactic protein 2, Wild type monocyte chemotactic protein 2, ZTGF-beta 9, alternative antibody scaffolds e.g. anticalin(s), adnectin(s), fibrinogen fragment(s), nanobodies such as camelid nanobodies, infestin, and/or any of the molecules mentioned in WO01/79271 (particularly page 9 and/or Table 1), WO 2003/59934 (particularly Table 1), WO03/060071 (particularly Table 1) or WO01/079480 (particularly Table 1) (each incorporated herein by reference in their entirety).

[0354] Furthermore, conjugates may comprise one or more (several) of chemotherapy drugs such as: 13-cis-Retinoic Acid, 2-CdA, 2-Chlorodeoxyadenosine, 5-Azacitidine, 5-Fluorouracil, 5-FU, 6-Mercaptopurine, 6-MP, 6-TG, 6-Thioguanine, A, Abraxane, Accutane®, Actinomycin-D, Adriamycin®, Adrucil®, Agrylin®, Ala-Cort®, Aldesleukin, Alemtuzumab, ALIMTA, Alitretinoin, Alkaban-AQ®, Alkeran®, All-transretinoic Acid, Alpha Interferon, Altretamine, Amethopterin, Amifostine, Aminoglutethimide, Anagrelide, Anandron®, Anastrozole, Arabinosylcytosine, Ara-C, Aranesp®, Aredia®, Arimidex®, Aromasin®, Arranon®, Arsenic Trioxide, Asparaginase, ATRA, Avastin®, Azacitidine, BCG, BCNU, Bevacizumab, Bexarotene, BEXXAR®, Bicalutamide, BiCNU, Blenoxane®, Bleomycin, Bortezomib, Busulfan, Busulfex®, C225, Calcium Leucovorin, Campath®, Camptosar®, Camptothecin-11, Capecitabine, Carac™, Carboplatin, Carmustine, Carmustine Wafer, Casodex®, CC-5013, CCNU, CDDP, CeeNU, Cerubidine®, Cetuximab, Chlorambucil, Cisplatin, Citrovorum Factor, Cladribine, Cortisone, Cosmegen®, CPT-11, Cyclophosphamide, Cytadren®, Cytarabine, Cytarabine Liposomal, Cytosar-U®, Cytoxan®, Dacarbazine, Dacogen, Dactinomycin, Darbepoetin Alfa, Dasatinib, Daunomycin, Daunorubicin, Daunorubicin Hydrochloride, Daunorubicin Liposomal, DaunoXome®, Decadron, Decitabine, Delta-Cortef®, Deltasone®, Denileukin diftitox, DepoCyt™, Dexamethasone, Dexamethasone acetate, Dexamethasone Sodium Phosphate, Dexasone, Dexrazoxane, DHAD, DIC, Diodex, Docetaxel, Doxil®, Doxorubicin, Doxorubicin liposomal, Droxia™, DTIC, DTIC-Dome®, Duralone®, Efudex®, Eligard™, Ellence™, Eloxatin™, Elspar®, Emcyt®, Epirubicin, Epoetin alfa, Erbitux™, Erlotinib, Erwinia L-asparaginase, Estramustine, Ethyol, Etopophos®, Etoposide, Etoposide Phosphate, Eulexin®, Evista®, Exemestane, Fareston®, Faslodex®, Femara®, Filgrastim, Floxuridine, Fludara®, Fludarabine, Fluoroplex®, Fluorouracil, Fluorouracil (cream), Fluoxymesterone, Flutamide, Folinic Acid, FUDR®, Fulvestrant, G-CSF, Gefitinib, Gemcitabine, Gemtuzumab ozogamicin, Gemzar®, Gleevec™, Gliadel® Wafer, GM-CSF, Goserelin, Granulocyte—Colony Stimulating Factor, Granulocyte Macrophage Colony Stimulating Factor, Halotestin®, Herceptin®, Hexadrol, Hexalen®, Hexamethylmelamine, HMM, Hycamtin®, Hydrea®, Hydrocort Acetate®, Hydrocortisone, Hydrocortisone Sodium Phosphate, Hydrocortisone Sodium Succinate, Hydrocortone Phosphate, Hydroxyurea, Ibritumomab, Ibritumomab Tiuxetan, Idamycin®, Idarubicin, Ifex®, IFN-alpha, Ifosfamide, IL-11, IL-2, Imatinib mesylate, Imidazole Carboxamide, Interferon alfa, Interferon Alfa-2b (PEG Conjugate), Interleukin-2, Interleukin-11, Intron A® (interferon alfa-2b), Iressa®, Irinotecan, Isotretinoin, Kidrolase®, Lanacort®, Lapatinib, L-asparaginase, LCR, Lenalidomide, Letrozole, Leucovorin, Leukeran, Leukine™, Leuprolide, Leurocristine, Leustatin™, Liposomal Ara-C, Liquid Pred®, Lomustine, L-PAM, L-Sarcolysin, Lupron®, Lupron Depot®, M, Matulane®, Maxidex, Mechlorethamine, Mechlorethamine Hydrochloride, Medralone®, Medrol®, Megace®, Megestrol, Megestrol Acetate, Melphalan, Mercaptopurine, Mesna, Mesnex™, Methotrexate, Methotrexate Sodium, Methylprednisolone, Meticorten®, Mitomycin, Mitomycin-C, Mitoxantrone, M-Prednisol®, MTC, MTX, Mustargen®, Mustine, Mutamycin®, Myleran®, Mylocel™, Mylotarg®, Navelbine®, Nelarabine, Neosar®, Neulasta™, Neumega®, Neupogen®, Nexavar®, Nilandron®, Nilutamide, Nipent®, Nitrogen Mustard, Novaldex®, Novantrone®, Octreotide, Octreotide acetate, Oncospar®, Oncovin®, Ontak®, Onxal™, Oprevelkin, Orapred®, Orasone®, Oxaliplatin, a taxol or taxol derivative e.g. Paclitaxel or Paclitaxel Protein-bound, Pamidronate, Panitumumab, Panretin®, Paraplatin®, Pediapred®, PEG Interferon, Pegaspargase, Pegfilgrastim, PEG-INTRON™, PEG-L-asparaginase, PEMETREXED, Pentostatin, Phenylalanine Mustard, Platinol®, Platinol-AQ®, Prednisolone, Prednisone, Prelone®, Procarbazine, PROCRIT®, Proleukin®, Prolifeprospan 20 with Carmustine Implant, Purinethol®, R, Raloxifene, Revlimid®, Rheumatrex®, Rituxan®, Rituximab, Roferon-A® (Interferon Alfa-2a), Rubex®, Rubidomycin hydrochloride, Sandostatin®, Sandostatin LAR®, Sargramostim, Solu-Cortef®, Solu-Medrol®, Sorafenib, SPRYCEL™, STI-571, Streptozocin, SU11248, Sunitinib, Sutent®, Tamoxifen, Tarceva®, Targretin®, Taxol®, Taxotere®, Temodar®, Temozolomide, Teniposide, TESPA, Thalidomide, Thalomid®, TheraCys®, Thioguanine, Thioguanine Tabloid®, Thiophosphoamide, Thioplex®, Thiotepa, TICE®, Toposar®, Topotecan, Toremifene, Tositumomab, Trastuzumab, Tretinoin, Trexall™, Trisenox®, TSPA, TYKERB®, VCR, Vectibix™, Velban®, Velcade®, VePesid®, Vesanoid®, Viadur™, Vidaza®, Vinblastine, Vinblastine Sulfate, Vincasar Pfs®, Vincristine, Vinorelbine, Vinorelbine tartrate, VLB, VM-26, Vorinostat, VP-16, Vumon®, Xeloda®, Zanosar®, Zevalin™, Zinecard®, Zoladex®, Zoledronic acid, Zolinza, Zometa®; radiopharmaceuticals such as: Carbon-11, Carbon-14, Chromium-51, Cobalt-57, Cobalt-58, Erbium-169, Fluorine-18, Gallium-67, Gold-198, Indium-111, Indium-113m, Iodine-123, Iodine-125, Iodine-131, Iron-59, Krypton-81m, Nitrogen-13, Oxygen-15, Phosphorous-32, Rhenium-186, Rubidium-82, Samarium-153, Selenium-75, Strontium-89, Technetium-99m, Thallium-201, Tritium, Xenon-127, Xenon-133, Yttrium-90; imaging agents such as Gadolinium, magnetite, manganese, technetium, 1125, 1131, P32, T1201, Iopamidol, PET-FDG.

[0355] Further fusion partners, conjugation partners and/or molecules for inclusion in a nanoparticle, associate or composition according to the invention include: acromegaly drugs e.g. somatuline, lanreotide, octreotide, Sandostatin; antithrombotics e.g. bivalirudin, Angiomax, dalteparin, Fragmin, enoxaparin, Lovenox, Drotrecogin alfa (e.g. Activated), Xigris, heparin; assisted reproductive therapy compounds e.g. choriogonadotropin, Ovidrel, follitropin, alpha/beta; enzymes e.g. hyaluronidase, Hylenex; diabetes drugs e.g. exenatide, Byetta, glucagon, insulin, liraglutide, albiglutide, GLP-1 agonists, exendin or an exendin analog; compounds useful in diagnosis e.g. protirelin, Thyrel TRH Thypinone, secretin (e.g. synthetic human), Chirhostim, thyrotropin (e.g. alpha), Thyrogen′ erythropoiesis drugs e.g. Darbepoetin alfa, Aranesp, Epoetin alfa, Epogen, Eprex, drugs for the treatment of genetic defects e.g. pegademase, drugs for the treatment of growth failure e.g. Adagen, mecasermin, rinfabate, drugs for the treatment of cystic fibrosis e.g. Dornase alfa, Pulmozyme, drugs for the treatment of metaoblic disorders e.g. Agalsidase beta, Fabrazyme, alglucosidase alpha, Myozyme, Laronidase, Aldurazyme, drugs for the treatment of genital wart intralesional e.g. Interferon alfa-n3, Alferon N, drugs for the treatment of granulomatous disease e.g. Interferon gamma-1b, Actimmune; drugs for the treatment of growth failure e.g. pegvisomant, Somavert, somatropin, Genotropin, Nutropin, Humatrope, Serostim, Protropin; drugs for the treatment of heart failure e.g. nesiritide, Natrecor; drugs for the treatment of hemophilia e.g. a coagulation factor e.g. Factor VIII, Helixate FS, Kogenate FS, Factor IX, BeneFIX, Factor Vila, Novoseven, desmopressin, Stimate, DDAVP; hemopoetic drugs e.g. Filgrastim (G-CSF), Neupogen, Oprelvekin, Neumega, Pegfilgrastim, Neulasta, Sargramostim, Leukine; drugs for the treatment of hepatitis C e.g. Interferon alfa-2a, Roferon A, Interferon alfa-2b, Intron A, Interferon alfacon-1, Infergen, Peginterferon alfa-2a, Pegasys, Peginterferon alfa-2b, PEG-Intron; drugs for the treatment of HIV e.g. enfuvirtide, Fuzeon; Fabs e.g. Fab (antithrombin), Abciximab, ReoPro; monoclonal antibodies e.g. Daclizumab, Zenapax; antiviral monoclonal antibodies e.g. Palivizumab, Synagis; monoclonal antibodies for the treatment of asthma e.g. Omalizumab, Xolair; monoclonal antibodies for use in diagnostic imaging e.g. Arcitumomab, CEA-Scan, Capromab Pendetide, ProstaScint, Satumomab Pendetide, OncoScint CR/OV, Fabs for use in diagnostic imaging e.g. Nofetumomab, Verluma; iimmuno-supressant monoclonal antibodies e.g. Basiliximab, Simulect, Muromonab-CD3, Orthoclone OKT3; monoclonal antibodies for the treatment of malignancy e.g. Alemtuzumab, Campath, Ibritumomab tiuxetan, Zevalin, Rituximab, Rituxan, Trastuzumab, Herceptin; monoclonal antibodies for the treatment of rheumatoid arthritis (RA) e.g. Adalimumab, Humira, Infliximab, Remicade; monoclonal antibodies for use as a radio-immuno-therapeutic e.g. Tositumomab and Iodine I¹³¹, Tositumomab, Bexxar; drugs for the treatment of macular degeneration e.g. pegaptanib, Macugen; drugs for the treatment of malignancy e.g. Aldesleukin, Proleukin, Interleukin-2, Asparaginase, Elspar, Rasburicase, Elitek, Denileukin diftitox, Ontak, Pegaspargase, Oncaspar, goserelin, leuprolide; drugs for the treatment of multiple sclerosis (MS) e.g. Glatiramer acetate (e.g. copolymer-1), Copaxone, Interferon beta-1a, Avonex, Interferon beta-1a, Rebif, Interferon beta-1b, Betaseron; drugs for the treatment of mucositis e.g. palifermin, Kepivance; drug for the treatment of dystonia e.g., neurotoxin, Botulinum Toxin Type A, BOTOX, BOTOX Cosmetic, Botulinum Toxin Type B, MYOBLOC; drugs for the treatment of osteoporosis e.g. teriparatide, Forteo; drugs for the treatment of psoriasis e.g. Alefacept, Amevive; drugs for the treatment of RA e.g. abatacept, Orencia, Anakinra, Kineret, Etanercept, Enbrel; thrombolytics e.g. Alteplase, Activase, rtPA, Anistreplase, Eminase, Reteplase, Retavase, Streptokinase, Streptase, Tenecteplase, TNKase, Urokinase, Abbokinase, Kinlytic; drugs for the treatment of osteoporosis e.g. calcitonin (e.g. salmon), Miacalcin, Fortical, drugs for the treatment of skin ulcers e.g. Becaplermin, Regranex, Collagenase, Santyl.

[0356] Such polypeptides and chemical compounds may be referred to as diagnostic moieties, therapeutic moieties, prophylactic moieties or beneficial moieties.

[0357] Preferably the fusion partner and/or conjugation partner is not an albumin, variant or fragment thereof.

[0358] One or more (several) therapeutic or prophylactic polypeptides may be fused to the N-terminus, the C-terminus of albumin, inserted into a loop in the albumin structure or any combination thereof. It may or it may not comprise linker sequences separating the various components of the fusion polypeptide.

[0359] Teachings relating to fusions of albumin or a fragment thereof are known in the art and the skilled person will appreciate that such teachings can also be applied to the invention. WO 2001/79271 Å and WO 2003/59934 Å (incorporated herein by reference) also contain examples of therapeutic and prophylactic polypeptides that may be fused to albumin or fragments thereof, and these examples apply also to the invention.

[0360] The invention is further described by the following examples that should not be construed as limiting the scope of the invention.

### EXAMPLES

### Materials and Methods

### Production of HSA Mutants and Hybrid Molecules Including Generation of C-Terminal Truncations of Albumin.

[0361] Variants of albumin were prepared using techniques known to the skilled person, for example using the methods of WO2011/051489 (PCT/EP10/066572) or by PCR using mutagenic oligonucleotide primers.

Production of shFcRn.

[0362] The construction and production of recombinant variants of shFcRn, such as GST-tagged shFcRn, have previously been described (36). Alternatively HIS-tagged shFcRn heterodimer was prepared as described in WO2011/124718.

### ELISA.

[0363] ELISA, using microtiter plates coated with HSA variants. GST-tagged shFcRn and horse radish peroxidase conjugated goat anti GST antibody was carried out according to Andersen et al (2012; Nature Communications 3:610; DOI:10.1038/ncomms1607).

### Surface Plasmon Resonance.

[0364] A Biacore 3000 instrument (GE Healthcare) was used with CM5 sensor chips coupled with shFcRn-GST (1000-2000 RU) using amine coupling chemistry as described by the manufacturer. The coupling was performed by injecting 10-12 μg/ml of each protein into 10 mM sodium acetate, pH 4.5 (GE Healthcare). For all experiments, phosphate buffer (67 mm phosphate buffer, 0.15 M NaCl, 0.005% Tween 20) at pH 6.0 or 7.4, or HBS-P buffer (0.01 M HEPES, 0.15 M NaCl, 0.005% surfactant P20) at pH 7.4 were used as running buffer and dilution buffer. Kinetic measurements were performed by injecting serial dilutions of HSA variants (80-0.1 μM) at 25° C. at a flow rate of 50 μl/min. In all experiments, data were zero adjusted, and the reference cell value was subtracted. Kinetic rate values were calculated using predefined models (Langmuir 1:1 ligand model and steady-state affinity model) provided by using the BIAevaluation 4.1 software.

Competitive binding was measured by injecting shFcRn (100 nM) alone or together with titrated amounts of HSA variants (1000-0.015 nM) over immobilized HSA (˜2000-2500 RU). The percentage (%) binding of shFcRn to HSA immobilised on the chip was calculated by dividing the total SPR response given by injecting the shFcRn alone by the response when pre-incubated with HSA variant.

### Circular Dichroism Spectroscopy

[0365] Circular dichroism (CD) spectra were recorded using a Jasco J-810 spectropolarimeter (Jasco International Co., Ltd., Tokyo Japan) calibrated with ammonium d-camphor-10-sulfonate (Icatayama Chemicals, Tokyo Japan). All measurements were performed with a HSA concentration of 2 mg ml⁻¹ in 10 mM PBS (pH 6.0) without NaCl added, at 23° C. using a quartz cuvette (Starna, Essex, UK) with a path length of 0.1 cm. Each sample was scanned 7 times at 20 nm min⁻¹ (band width of 1 nm) at a response time of 1 s, and the wavelength range was set to 190-260 nm. The collected data were averaged and the spectrum of a sample-free control was subtracted. The content of secondary structural elements was calculated after smoothing (means-movement, convolution width 5) from ellipticity data, using the neural network program CDNN version 2.1 and the supplied neural network based on the 33-member basis set (Bohm et al (1992) Protein Eng 5, 191-195).

### Docking Procedure.

[0366] Docking models of HSA and shFcRn were generated using the ZDOCK Fast Fourier Transform based protein docking program (37). The coordinates for HSA DIII (residues 382-582) were retrieved from the crystal structure of HSA at 2.5 Å (PDB code 1bm0) (19)). Two different models of shFcRn were used: the 2.7 Å resolution structure of FcRn at pH 8.2 (PDB code 1exu) and the 2.6 Å resolution structure at pH 4.2 (PDB code 3m17) 98, 23). The β2m domain, present in both structural models of shFcRn, was included in the receptor model during docking. The ZDOCK program was run with preferences for docking poses with the two histidines His-161 and His-166 in FcRn and residues His-464, His-510 and His-535 in HSA. All crystal structure figures were designed using PyMOL (DeLano Scientific) with the crystallographic data described herein.

### Example 1: Construction of Docking Model

[0367] Docking models of HSA and shFcRn were generated using the ZDOCK Fast Fourier Transform based protein docking program (Chen R et al (2003) Proteins 52(1):80-87). The coordinates for HSA DIII (residues 382-582) were retrieved from the crystal structure of HSA at 2.5 Å (PDB code 1bm0 (Sugio S et al (1999) Protein Eng 12(6):439-446). Two different models of shFcRn were used: the 2.7 Å resolution structure of FcRn at pH 8.2 (PDB code 1exu) and the 2.6 Å resolution structure at pH 4.2 (PDB code 3m17) (West et al (2000) Biochemistry 39(32):9698-9708, and Mezo A R et al (2010) J Biol Chem 285(36):27694-27701). The β2m domain, present in both structural models of shFcRn, was included in the receptor model during docking. The ZDOCK program was run with preferences for docking poses with the two histidines His-161 and His-166 in FcRn and residues His-464, His-510 and His-535 in HSA in the protein-protein interface (19). All crystal structure figures were designed using PyMOL (DeLano Scientific) with the crystallographic data described above.

[0368] The software returned one model for the docking of sub-domain DIII against shFcRn with an ordered loop at pH 4.2 and eight models for shFcRn at pH 8.2, lacking loop residues 52-59. Among these eight models, five evidently showed erroneous (incompatible) poses as judged by the position of HSA domains DI and DII, and were rejected. The three remaining models were closely related and had the same general structural pose. Superposition of the low pH form of FcRn on these then showed that the structured loop made no severe conflicts with the docked HSA. The final selected model (coordinates are shown in FIGS. 18 and 19) reveals interaction areas that fit very well with the obtained binding data (FIG. 8A). Particularly, the long loop between sub-domains DIIIa and DIIIb (490-510) as well as the C-terminal part (last C-terminal α-helix) of HSA form a crevice on the surface of HSA into which the pH-dependent and flexible loop in shFcRn (residues 51-60) may bind (FIG. 8B). The structure of shFcRn reveals that His-166 stabilizes the loop through intra-molecular interaction with Glu-54 (FIG. 7A), however the docking model suggests that His-166 may additionally be engaged in binding to Glu-505 of HSA (FIG. 8B). Glu-505 may also interact with Arg-162 of the receptor. A key role of His-510 is supported by the fact that it is predicted to interact with Glu-54 within the pH-dependent α1-domain loop (FIG. 8B). Mutation of His-510 (H510Q) reduced binding by 14-fold (FIG. 3c, Table 1). Thus, His-166 in hFcRn and His-510 in HSA seem to be involved in regulating an ionic network in the core of the hFcRn-HSA interaction interface.

[0369] The model also predicts possible salt-bridges between Lys-150 and Glu-151 of shFcRn with Glu-501 and Lys-500 of HSA, respectively (FIG. 8B). This is in line with the binding data that show reduced binding capacity of HSA variants mutated at these positions (FIG. 6B). Furthermore, the model proposes a key role of the alpha helix at the C-terminal end of HSA. This is supported by the fact that deletion of the last 17 amino acids of DIIIb almost eliminated binding to shFcRn (FIG. 14).

[0370] Another cleft on the surface of HSA is formed between the DIIIa-DIIIb connecting loop and one of the other α-helices of DIIIb (residues 520-535). Here, His-161 of shFcRn may interact with Glu-531 at acidic pH (FIG. 8B). This is in agreement with previous findings where a 10-fold reduced binding affinity was found when His-161 was mutated (Andersen J T et al (2006) The conserved histidine 166 residue of the human neonatal Fc receptor heavy chain is critical for the pH-dependent binding to albumin. Eur J Immunol 36(11):3044-3051). The HSA-shFcRn complex could further be reinforced by a salt-bridge formed between Glu-168 of shFcRn and Lys-524 of DIII, a prediction that is supported by the fact that mutation of Glu-168 moderately reduces binding to HSA (FIG. 15).

[0371] Moreover, His-535 may interact favorably with Phe-157 while His-464 is localized close to a β-hairpin within FcRn encompassing residues 99-102 that is wedged in-between domains DI and the sub-domain DIIIa in HSA (FIG. 8C). Here, shFcRn Asp-101 has several possible partners in DI such as Arg-197 and Lys-190, however, they must necessarily undergo some conformational changes in order to get close to Asp-101. Interestingly, the β-hairpin has two different conformations, depending on the pH (West et al (2000)). This suggests that Asp-101 is indeed located in a flexible element of shFcRn. Crystal structure and immunoglobulin G binding properties of the human major histocompatibility complex-related Fc receptor, Biochemistry 39(32):9698-9708, and Mezo A R et al (2010) X-ray crystal structures of monomeric and dimeric peptide inhibitors in complex with the human neonatal Fc receptor, FcRn. J Biol Chem 285(36):27694-27701, suggesting that it forms a flexible element in shFcRn.

[0372] The MHC class I-related FcRn has evolved to protect IgG and albumin from catabolism (5, 8, 22). While FcRn binding to IgG has been studied in great detail for decades, its recently discovered interaction with albumin is poorly understood at the molecular level. The data herein provides mechanistic evidence for the importance of several interaction surfaces on both molecules that reveal how they interact in a pH-sensitive fashion, facilitating cellular recycling.

[0373] The finding that DIII alone, unlike DI+DII, could bind to the receptor, modulated by pH, conclusively shows that DIII harbors the principal core binding site for FcRn, in agreement with a previous report (9. However, the data also show a role for DI in binding, e.g. the docking model suggests an interaction between FcRn and HSA DI. More specifically, the affinity for DIII alone is considerably weaker than that for full length HSA, a finding that suggest that there may be a moderate contribution to binding to the receptor from DI or DII, either directly or indirectly. The data also show that a DI-DIII construct bound hFcRn slightly stronger than a single HSA DIII. This might be due to structural stabilization of DIII or that DI interacts with hFcRn when fused to DIII, although DI in the DI-DIII fusion has a different location than DI in the full-length HSA. Interestingly, the model suggests that there may be some interactions between DI and shFcRn

[0374] Several HSA polymorphisms, localized to DIII (16), may affect receptor binding and consequently their levels in blood. One such polymorphism, Casebrook, with a single point mutation that introduces an N-linked glycosylation site, is present in about 35% of WT albumin in heterozygous carriers (20). Introduction of the mutation in rabbit albumin resulted in a variant with 50% reduction in half-life when injected into rabbits (24). Based on these observations, a HSA variant mimicking Casebrook was prepared (WO2011/051489 (PCT/EP10/066572), incorporated herein by reference) and was found that it had a 2-fold reduction in affinity for shFcRn. This was also the case for Casebrook variant isolated from a heterozygous individual, displaying a 50% decrease in the ability to compete for binding to shFcRn in the presence of WT albumin. When inspecting the crystal structure of shFcRn solved at acidic pH, the partially exposed and protonated His-166 was found to be engaged in stabilizing a loop that was disordered at basic pH, through binding to an acidic (Glu-54) and a polar (Tyr-60) amino acid, respectively. The disorder of the loop is likely explained by loss of protonation of His-166 at basic pH, which then probably regulates the flexibility and conformation of the loop in a pH-dependent manner.

[0375] A total of four histidine residues in HSA DIII were individually mutated to glutamine residues. The three highly conserved histidine residues (His-464, His-510 and His-535) were found to be important for binding at acidic pH. The information relating to the importance of the histidine residues present in DIII, and also the importance of His-166 within FcRn for binding to HSA, were used to guide docking of the HSA-shFcRn complex. In line with the molecular data, DIII forms the major interaction interface with a minor contribution from DI. Furthermore, it has been shown that both IgG and albumin bind to non-overlapping sites without interfering with the binding of the other protein (9, 21). This fits well with the docking model where no hindrance exists for simultaneous binding of the two ligands (FIG. 16). Whether or not albumin binding induces conformation changes on the receptor or vice versa cannot be excluded.

[0376] Following inspection of the docking model, no direct contact between the oligosaccharide attachment site (Asn-494) present in HSA Casebrook variant and shFcRn was found. However, Asp-494 is part of the N-terminal region of the extended loop (490-510) connecting DIIIa and DIIIb, and it is very likely that alteration of the composition at the N-terminal end of the loop induces conformation changes in the loop at large. Structural importance of Asp-494 and Glu-495 residues is supported by the fact that both are highly conserved across species (FIG. 2). Importantly, the docking model suggests that several residues in the C-terminal end of the loop are in direct contact with the α1-α2-platform of the receptor, with predicted key residues being His-510 and Glu-505 on HSA, as well as Glu-54 on shFcRn. His-510 is one of the three conserved histidine residues, and mutation of this residue (i.e. H510Q) reduced binding to shFcRn significantly. Of the remaining two conserved histidine residues on HSA that are involved in FcRn binding, His-535 may reinforce the HSA-FcRn complex by aromatic stacking or stabilization of the loop between sub-domains DIIIa and DIIIb in HSA. His-464 may interact, directly or indirectly, with a flexible β-hairpin element in FcRn. Interestingly, this β-hairpin loop is the most flexible part in FcRn, except for the pH-dependent loop stabilized by His-166, as judged by a comparison of the low and high pH crystal structures. The flexible β hairpin loop is the most flexible part in FcRn, except for the pH-dependent loop stabilized by His-166, as judged by a comparison of the low and high pH crystal structures. The flexible β-hairpin in shFcRn is in contact with both the α-helix in HSA that contains His-464 as well as a long loop in DI, suggesting an indirect conformational “tuning” of the shFcRn-HSA interface involving DI and DIIIa. In summary, the data shows that histidine residues on both FcRn and albumin are fundamental for optimal pH-dependent binding. The data support a study showing that mutation of conserved histidine residues to alanine resulted in increased clearance of HSA DIII mutants fused to antibody fragments when injected into mice, however, no correlation to FcRn binding was shown (25). Furthermore, from an evolutionary perspective it is interesting that two completely unrelated soluble molecules with different functions have evolved to bind a single cell bound receptor in a similar pH- and histidine-dependent manner that in both cases results in rescue from degradation and prolonged half-life.

[0377] The principal function of albumin is to transport fatty acids that are bound asymmetrically to hydrophobic pockets within or between the three domains (1, 26, 27). HSA DIII harbors two high affinity binding sites, and the fatty acids bind close to the loop between HSA DIIIa and DIIIb, which also includes several residues found to affect FcRn binding. Comparison of the fatty acid bound and the free state of HSA (19, 27) shows no substantial rearrangements within sub-domain DIII of HSA upon binding, but a considerable shift in orientation of HSA DI relative to HSA DIII (FIG. 17). In effect, superposition of DIII in the fatty acid binding HSA onto the corresponding FcRn-binding domain in the docking model reveals that DI may move away from FcRn when binding fatty acids.

[0378] The half-life regulatory function of FcRn may be utilized for therapeutic and diagnostic purposes, as discussed elsewhere (28, 29). Obviously, bioactive peptides and small proteins obtained from combinatorial libraries or molecular engineering are promising candidates, however, they (and all drugs) may fail to show convincing effects in vivo due to very short half-lives as a consequence of their size being below the renal clearance threshold as well as susceptibility to degradation by proteases (30, 31). This limits transition of such molecules from lead candidate to a drug(s) on the market. A solution to these obstacles may be to take advantage of the prolonged half-life of IgG or albumin controlled by FcRn. Several examples have shown that genetic fusion of therapeutic proteins to the IgG Fc or HSA improves bio-distribution and pharmacokinetics (29).

[0379] The serum half-life of IgG may also be extensively improved beyond that evolved by nature. This is an intense area of research that has generated engineered IgG variants with point mutations in their Fc portion resulted in improved pH-dependent FcRn binding, and consequently extended half-life in vivo (4, 5, 32). No examples have so far been presented for albumin, except for the observation that mouse albumin binds much stronger to shFcRn than HSA (21). The docking model presented in this study may guide the development of novel HSA variants with increased serum half-life, which could be attractive for delivery of both chemical and biological drugs.

[0380] Tumors and inflamed tissues show increased accumulation of albumin as a result of leaky capillaries and defective lymphatic drainage (33). Consequently, albumin-based therapeutics or diagnostics accumulate at the site of tumor or inflammation. Furthermore, fine-tuning of albumin half-life may also be an attractive approach in relation to tumor targeting and imaging due to tissue toxicity of the fused molecules. Modulation of IgG half-life by attenuating the affinity for FcRn has been shown to improve tumor to normal tissue ratio and consequently improve tumor imaging (34, 35). The HSA variants described in this paper, with substantially reduced or no or intermediate FcRn binding affinities, may serve as attractive albumin candidates.

[0381] WO2011/051489 (PCT/EP10/066572; incorporated herein by reference) shows that a given position of albumin (e.g. position 573 of HSA) can be substituted by any other amino acid to alter the binding affinity for FcRn. Thus, alteration of a signal position provides a group of albumin variants having binding affinity different to the binding affinity of the parent albumin (WT HSA, SEQ ID NO: 2). For position 573, all variants showed improved binding to shFcRn compared with WT HSA. In particular the variants K573F, K573H, K573P, K573W and K573Y had a more than 10 fold lower KD to shFcRn than the parent HSA. The variant K573STOP is a truncated albumin having a stop codon in position 573 and has significantly reduced binding compare to WT HSA.

### Example 2. Identification of the Regions of HSA that are Required for Optimal Binding to FcRn and Therefore Whose Alteration Will Alter Binding Affinity Between FcRn and Albumin

[0382] Based on the docking model, the positions of amino acid residues were identified, visually, which are directly localized at the interaction interface between albumin and FcRn or localized in close proximity to the interface. These positions are shown by dark shading in FIG. 9 and correspond to positions in Domain I of albumin: 30 to 41, 75 to 91, 104 to 120, 144 to 150 and 186 to 201 and to positions in Domain III of albumin: 414 to 426, 457 to 572, 492 to 538 and 550 to 585.

### Example 3. Identification of Amino Acid Positions Involved in Binding of HSA to FcRn. DIII is Involved in pH Dependent Binding to FcRn

[0383] Albumin consists of three homologous domains (DI, DII and DIII), comprising α-helices stabilized by a complex network of twelve cysteine residues forming six disulfide bridges (19). The three domains are linked by loops and form a heart shaped structure (FIG. 4B). Two previous studies have pointed to DIII of albumin as being important for FcRn binding (2,17). To confirm this and further investigate how each individual domain contributes to the FcRn binding site, several domain variants (DI-DIII, DII-DIII, DI-DII, DIII) as well as full length HSA (FIG. 4C) were produced in yeast (FIG. 4D). The binding of each to immobilized soluble recombinant human FcRn (shFcRn-GST) was measured by surface plasmon resonance (SPR), such that equal amounts of domain variants were injected at pH 6.0 and pH 7.4. The variant consisting solely of DIII bound shFcRn, and the variant missing DIII did not bind (FIG. 4E). Furthermore, the DI-DIII variant bound slightly stronger to shFcRn than DIII alone (Table 2a). DII, on the other hand, did not seem to contribute to binding.

[0384] Each of the three HSA domains has two sub-domains, a and b. To address the importance of the C-terminal sub-domain DIIIb, a HSA variant where this domain was deleted was prepared (HSA DIIIa). Lack of DIIIb completely abolished shFcRn binding (FIG. 4F). The recombinant HSA Bartin variant was included for comparison (17) and supports the observation that DIIIb is important for receptor binding. These results demonstrate that an intact DIII is important for receptor binding.

TABLE 2a
SPR-derived kinetics for binding of HSA variants to shFcRn-GST.

| | | Ka | Kd | KD |
|---|---|---|---|---|
| Albumin variant | SEQ ID No. | (10³/Ms) | (10⁻³/s) | (μM)^{a} |
| WT | 2 | 5.9 ± 0.1 | 7.0 ± 0.2 | 1.1 |
| DIII | 27 | 2.6 ± 0.0 | 72.0 ± 0.0 | 27.0/17.4^{b} |
| DI-DII | 145 | NA^{d} | NA | NA |
| DII-DIII | 25 | 1.4 ± 0.2 | 30.0 ± 0.2 | 21.4/22.3^{b} |
| DI-DIII | 24 | 3.2 ± 0.1 | 45.2 ± 0.1 | 14.1/15.0^{b} |
| Q417A | 146 | 5.0 ± 0.0 | 11.1 ± 0.1 | 2.2 |
| H440Q | 147 | 5.1 ± 0.0 | 7.0 ± 0.1 | 1.3 |
| H464Q | 148 | ND^{c} | ND | 14.1^{b} |
| D494N (Casebrook) | 149 | 3.8 ± 0.0 | 8.5 ± 0.0 | 2.2 |
| D494A | 150 | 5.9 ± 0.1 | 21.0 ± 0.0 | 3.6 |
| D494Q | 151 | 5.4 ± 0.2 | 25.5 ± 0.1 | 4.7 |
| E495Q | 152 | 4.2 ± 0.0 | 13.1 ± 0.0 | 3.1 |
| E495A | 153 | 3.8 ± 0.1 | 13.0 ± 0.0 | 3.4 |
| T496A | 154 | 5.4 ± 0.0 | 7.6 ± 0.2 | 1.4 |
| D494N/T496A | 155 | 5.4 ± 0.1 | 8.5 ± 0.2 | 1.5 |
| Casebrook | 149 | 3.6 ± 0.1 | 9.7 ± 0.1 | 2.7 |
| P499A | 157 | 2.6 ± 0.0 | 12.1 ± 0.0 | 4.6 |
| K500A | 158 | 14.3 ± 0.2 | 47.8 ± 0.0 | 33.4 |
| E501A | 159 | 5.1 ± 0.0 | 9.8 ± 0.0 | 1.9 |
| H510Q | 160 | ND | ND | 12.1^{b} |
| H535Q | 161 | ND | ND | 16.2^{b} |
| K536A | 162 | 4.4 ± 0.2 | 9.3 ± 0.1 | 2.1 |
| P537A | 163 | 3.7 ± 0.1 | 14.3 ± 0.2 | 3.9 |
| K538A | 164 | 3.9 ± 0.0 | 7.1 ± 0.0 | 1.8 |
| HSA 568Stop | 45 | ND | ND | 17.0 |
| HSA DIIIa | 165 | NA | NA | NA |

^{a}The kinetic rate constants were obtained using a simple first-order (1:1) Langmuir bimolecular interaction model, which assumes that one HSA molecule binds one FcRn. The kinetic values represent the average of triplicates.
^{b}The steady-state affinity constant was obtained using an equilibrium (Req) binding model supplied by the BIAevaluation 4.1 software. The kinetic values represent the average of triplicates.
^{c}ND, not determined due to no or very weak binding.
^{d}NA, not acquired because of fast binding kinetics.

Casebrook—a Point Mutation in HSA DIII that Alters FcRn Binding

[0385] HSA is normally non-glycosylated, but a few exceptions exist due to rare polymorphisms (16). One such variant (Casebrook) has a single nucleotide substitution that changes the coding from Asp to Asn at amino acid residue 494 (20), localized in the stretch of amino acids (residue 490-510) that form a long loop connecting the sub-domains DIIIa and DIIIb (FIGS. 5A and 6A). This natural polymorphism introduces a glycosylation motif (⁴⁹⁴Asn-Glu-Thr⁴⁹⁶) and attachment of an N-linked oligosaccharide. A study was made of migration in SDS-PAGE and FcRn binding of a number of recombinant HSA variants that allowed us to dissect the role of the oligosaccharide and individual amino acids at ⁴⁹⁴Asn-Glu-Thr⁴⁹⁶. The recombinant version of Casebrook (D494N) migrated more slowly than wild type (WT) HSA in SDS-PAGE, which reflects attachment of oligosaccharide residues (FIG. 58). Moreover, in six variants, D494A, D494Q, E495Q, E495A, T496Aand D494N/T496A, the glycosylation motif was disrupted, and consequently, all of these mutants migrated like their WT counterpart (FIG. 58).

[0386] All variants were tested for binding to immobilized shFcRn by SPR, and distinct binding differences were detected at acidic pH with a hierarchy from strongest to weakest binding as follows; WT>T496A>D494N/T496A>D494N>E495Q E495A>D494A>D494Q (FIG. 5C-F, Table 2a). The same trend was obtained when binding was studied by ELISA (FIG. 10). The binding kinetics revealed differences in dissociation rates for most mutants except D494N (Casebrook), which showed a 2-fold reduced binding affinity, resulting from both altered association and dissociation constants. Mutation of Asp-494 and Glu-495 to Ala or Gln had a large effect on receptor binding, while mutation of the flanking Thr-496 had only a small effect on binding. The HSA Casebrook variant isolated from a heterozygous individual bound shFcRn similar to its recombinant counterpart (FIG. 5F, FIG. 11, Table 2a).

[0387] The Casebrook variant is present at a 2-3 fold lower level than normal HSA in heterozygous individuals (20). To mimic an in vivo situation, where the Casebrook variant exists in the presence of large amounts of WT HSA that competes for FcRn binding, a competitive SPR-based assay was used and found that the ability of the Casebrook variant to compete for receptor binding was reduced by almost 50% compared with HSA WT (FIG. 5G), a finding that mirrors the 2-fold reduction in binding affinity (Table 2a).

### Structural Implications of Casebrook—Stability of the DIIIa-DIIIb Connecting Loop

[0388] The integrity and folding of the HSA mutants were investigated by circular dichroism. No major difference from that WT HSA was observed for any of the mutants at both pH 7.4 and pH 6.0 (FIG. 12, Table 3).

TABLE
3 Secondary structural elements determined by CD

| | Structural elements pH 7.4 | | | | | Structural elements pH 6.0 | | | | |
|---|---|---|---|---|---|---|---|---|---|---|
| HSA | | Anti- | | Beta | Random | | Anti- | | Beta | Random |
| Variant | Helix | parallel | Parallel | turn | Coli | Helix | parallel | Parallel | turn | Coli |
| WT | 72 | 0 | 0.7 | 7.3 | 20 | 64.8 | 0.5 | 1.7 | 10.1 | 22.4 |
| D494N | 65.6 | 0.4 | 1.7 | 10.3 | 22 | 67.9 | 0.2 | 1.4 | 9.3 | 21.2 |
| D494A | 62.2 | 1.4 | 2.5 | 12.7 | 21.2 | 65.9 | 0.5 | 1.7 | 10.3 | 21.7 |
| E495Q | 65.3 | 0.3 | 1.7 | 10.4 | 22.2 | 65 | 0.6 | 1.8 | 10.5 | 22.1 |
| E495A | 64.8 | 0.5 | 1.8 | 10.6 | 22.2 | 65.1 | 0.5 | 1.7 | 10.5 | 22.2 |
| D494Q | 66.1 | 0.3 | 1.6 | 10.1 | 21.8 | 67.1 | 0.3 | 1.5 | 9.5 | 21.6 |
| D494N + | 64.2 | 1 | 1.9 | 11.2 | 21.7 | 65.2 | 0.4 | 1.8 | 10.3 | 22.3 |
| T496A | | | | | | | | | | |
| T496A | 65.8 | 0.5 | 1.6 | 10.2 | 22 | 64.5 | 0.6 | 1.9 | 10.8 | 22.3 |

[0389] Next, the crystal structure of HSA (19) was inspected, and found Asp-494 to be involved in an intra-molecular network of polar interactions involving amino acids in both DIII sub-domains, a and b (FIG. 5A). The carboxylic side chain of Asp-494 forms a charged-stabilized salt-bridge with Arg-472 as well as hydrogen bonds with both Gln-417 and Thr-496. N-linked glycosylation of Asn-494 will reduce its hydrogen-bonding capacity and eliminate the negative component of the salt-bridge, which may be important for stabilizing the loop. In support of this is the finding that a Q417A mutation also has reduced binding to shFcRn (FIG. 5H, Table 2a). Furthermore, glycosylation, i.e. an introduction of a bulky moiety, may very well destabilize the N-terminal end of the loop encompassing residues 490-495, and thus affect its conformation.

[0390] Beside Asp-494, Glu-495 and Thr-496 at the N-terminal end of the loop, Pro-499, Lys-500 and Glu-501 in the middle of the loop (FIG. 6A) were targeted by mutagenesis and investigated the effect on shFcRn binding. Moderate effects were found for P499A and E501A, while K500A dramatically reduced binding to the receptor (FIG. 68, Table 2a).

### A Role for Conserved Histidine Residues in HSA DIII

[0391] Guided by the fact that histidine residues are key players in the strictly pH-dependent IgG-FcRn interaction (4, 5), the role of the four histidine residues found within HSA DIII were assessed. Of these, three are highly conserved across species (His-464, His-510 and His-535) and one is not (His-440) (FIG. 2). While His-440 and His-464 are found within sub-domain DIIIa, His-510 is localized to the end of the loop connecting sub-domains DIIIa and DIIIb, and His-535 is found in one of the α-helices of DIIIb (FIG. 6A). All four histidine residues were mutated individually to glutamine (FIG. 13) and tested for binding to shFcRn at pH 6.0. Mutation of each of the three conserved histidine residues almost completely abolished binding, whereas mutation of the non-conserved His-440 did not (FIG. 6C, Table 2a). Thus, the data pin point the three histidine residues within DIII as fundamental for pH-dependent FcRn binding, which parallels the requirement for conserved histidine residues in the Fc elbow region of IgG (His-310 and His-435).

[0392] Furthermore, amino acids in the vicinity of His-535 (Lys-536, Pro-537 and Lys-538), when individually mutated to alanine residues, were also shown to attenuate binding (FIG. 6D, Table 2a). Taken together, the binding data define a core structural area on DIII important for pH-dependent FcRn binding.

### Mapping the Binding Site on FcRn

[0393] We have previously identified a highly conserved histidine residue localized to the α2-domain of both mouse and human FcRn HC to be important for albumin binding (His-168 and His-166, respectively) (21, 22). To obtain a molecular explanation, a crystal structure of shFcRn that was recently solved under acidic conditions (pH 4.2) (FIG. 4A) (23) was inspected. It was found that His-166 is engaged in a network of intra-molecular interactions that involves charge stabilized hydrogen bonds with Glu-54 and Tyr-60 found on a surface exposed loop within the α1-domain (residue 51-60) (FIG. 7A). At low pH, His-166 will carry a positive charge and this suggests that uncharged His-166 will loosen or lose its interactions with Glu-54 and Tyr-60 at physiological pH, which will result in a more flexible loop. This explanation is supported by the fact that this loop-region is structurally disordered in the crystal structure of shFcRn solved at basic pH (pH 8.5) (FIG. 7B). Further, the corresponding loop is also ordered with a defined conformation in the co-crystal structure of rat FcRn in complex with rat IgG2a Fc solved at acidic pH (6). A comparison of the two human FcRn structures at low and high pH suggests a pivotal regulatory role of His-166 in locking and release of the flexible loop between Trp-51 and Tyr-60 (FIGS. 7a and 7b).

[0394] Glu-54 is also involved in an interaction with Gln-56 (FIG. 7A). To address the importance of Glu-54 and Gln-56, both residues were individually mutated to glutamine or alanine, respectively, and the two resulting receptor variants (shFcRn E54Q and shFcRn Q56A) were tested for binding to HSA by ELISA at pH 6.0 (using the method described in WO2011/051489 (PCT/EP10/066572), incorporated herein by reference). The impact of the E54Q mutation was striking, as almost no receptor binding to HSA was detected, whereas the Q56A variant partially lost binding to HSA (FIG. 7C). Thus, the data demonstrate an important structural role for His-166 in stabilizing the al-domain loop of shFcRn in a pH-dependent fashion via binding to Glu54, and that an ordered structure of this loop at acidic pH is indispensable for efficient albumin binding.

### Example 4. Truncation of the C-Terminal End of HSA Modulates Binding to shFcRn

[0395] Expression constructs for truncated HSA mutants (Table 6, below) were generated by PCR and gap-repair. PCR products were generated using Phusion Polymerase (New England Biolabs), according to the manufacturer's instruction, using pDB3927 (described in WO2010/092135 (incorporated herein by reference)) as a template and oligonucleotides (Tables 4 and 5). This resulted in DNAs in which specific codons (i.e. amino acids 568 and 572 to 585, excluding position 573) were replaced with the translational stop codon amino TAA. These PCR products were cloned into plasmids and used to form expression plasmids in yeast by gap repair.

TABLE 4
Truncated HSA molecules

| | SEQ ID No. | Oligonucleotide | |
|---|---|---|---|
| Molecule | (molecule) | pair | Plasmid |
| HSA 585stop | 32 | xAP265/xAP294 | pDB4544 |
| HSA 584stop | 33 | xAP265/xAP295 | pDB4545 |
| HSA 583stop | 34 | xAP265/xAP296 | pDB4546 |
| HSA 582stop | 35 | xAP265/xAP297 | pDB4547 |
| HSA 581stop | 36 | xAP314/xAP298 | pDB4548 |
| HSA 580stop | 37 | xAP314/xAP299 | pDB4549 |
| HSA 579stop | 38 | xAP314/xAP300 | pDB4550 |
| HSA 578stop | 39 | xAP314/xAP301 | pDB4551 |
| HSA 577stop | 40 | xAP314/xAP302 | pDB4552 |
| HSA 576stop | 41 | xAP314/xAP303 | pDB4553 |
| HSA 575stop | 42 | xAP314/xAP304 | pDB4554 |
| HSA 574stop | 43 | xAP314/xAP305 | pDB4555 |
| HSA 572stop | 44 | xAP314/xAP306 | pDB4556 |
| HSA 568stop | 45 | xAP314/xAP307 | pDB4557 |

In Table 4, albumin variants are named such that ‘HSA 585stop’ is an HSA variant in which the native amino acid at position 585 is substituted with a stop codon.

[0396] Specifically, for HSA568stop expression construct oligonucleotides xAP314 and xAP307 were used to amplify a 493 bp fragment from pDB3927, containing DNA sequence encoding HSA DIII, according to the manufacturer's instructions. A stop codon was engineered into oligonucleotide xAP307 so that translation of the DNA sequence encoding HSA terminated following amino acid 567. The PCR fragment was digested with AvrII/Bsu36I purified using a Qiagen PCR-clean up kit (according to the manufacturer's instructions) and ligated into AvrII/Bsu36I-digested pDB3927. Ligations were transformed into E. coli DH5a, subsequently plasmids were isolated from transformants (Qiagen miniprep kit (according to the manufacturer's instructions)) and the correct constructs were identified by restriction analysis. This produced the HSA568stop expression construct pDB4557.

[0397] The HSA572stop and HSA574stop to HSA581 stop expression constructs were made in the same manner as the HSA568stop construct using the oligonucleotides (Table 5) to produce plasmids pDB4548 to pDB4556 (Table 4).

[0398] For the HSA582stop to HSA585stop constructs (1.122 kb) fragments were PCR amplified from pDB3927 using oligonucleotides (Table 5). The PCR-fragments were each digested with Bg/II/HindIII isolated and ligated into pDB2923 (Finnis, C. J. et al. (2010). High-level production of animal-free recombinant transferrin from Saccharomyces cerevisiae. Microb Cell Fact 9, 87) to produce plasmids #10D, #11B, #12C and #13D, respectively. Plasmids #10D to #13D were digested with AvrII/SphI and 666 bp fragments (containing the DNA encoding the C-terminal end of albumin) were isolated from each and ligated into AvrII/SphI-digested pDB3927 to produce the gap-repair constructs pDB4544-pDB4547, respectively (Table 4).

[0399] Plasmids pDB4544-pDB4557 were digested with NsiI/PvuI, the DNA was purified (Qiagen PCR Purification kit as per the manufacturer's instructions), before being used, along with Acc65I/BamHI-digested pDB3936, to co-transform S. cerevisiae BXP10cir⁰ as described above generating expression plasmids in the yeast by gap-repair.

Stocks were prepared for each resultant yeast strain. 10 ml BMMD broth (0.17% (w/v) yeast nitrogen base without amino acid and ammonium sulphate (Difco), 37.8 mM ammonium sulphate, 36 mM citric acid, 126 mM disodium hydrogen orthophosphate pH6.5, 2% (w/v) glucose, adjusted to pH 6.5 with NaOH) was inoculated with the required strain and grown for 48 hours at 30° C. with orbital shaking at 200 rpm. 5 mL of each culture was then mixed with an equal volume of 40% [w/v] trehalose and 1 ml aliquots transferred to cryovials for storage at −80° C.

[0400] Construction of a yeast strain producing the HSA573stop variant is described in WO2011/0541489 (incorporated herein by reference).

TABLE 5
Oligonucleotide sequences for preparation
of truncated HSA mutants

| Oligo- | | SEQ |
|---|---|---|
| nucleotide | Sequence (5′-3′) | ID No: |
| xAP265 | GCTCGCCTGAGCCAGAG | 46 |
| xAP294 | GAATTAAGCTTATTATTAGCCTAAGGCAGC | 47 |
| xAP295 | GAATTAAGCTTATTATAATTATAAGGCAGC | 48 |
| xAP296 | GAATTAAGCTTATTATAAGCCTTAGGCAGCTTG | 49 |
| xAP297 | GAATTAAGCTTATTATAAGCCTAATTAGGCTTGACTTGC | 50 |
| xAP298 | GAATTAAGCTTATTATAAGCCTAAGGCTTATTGACTTGCAGCAACAAG | 51 |
| xAP299 | GAATTAAGCTTATTATAAGCCTAAGGCAGCTTAACTTGCAGCAACAAG | 52 |
| xAP300 | GAATTAAGCTTATTATAAGCCTAAGGCAGCTTGTTATGCAGCAACAAG | 53 |
| xAP301 | GAATTAAGCTTATTATAAGCCTAAGGCAGCTTGACTTTAAGCAACAAG | 54 |
| xAP302 | GAATTAAGCTTATTATAAGCCTAAGGCAGCTTGACTTGCTTAAACAAGTT | 55 |
| | TTTTAC | |
| xAP303 | GAATTAAGCTTATTATAAGCCTAAGGCAGCTTGACTTGCAGCTTAAAGTT | 56 |
| | TTTTAC | |
| xAP304 | GAATTAAGCTTATTATAAGCCTAAGGCAGCTTGACTTGCAGCAACTTATT | 57 |
| | TTTTACCCTC | |
| xAP305 | GAATTAAGCTTATTATAAGCCTAAGGCAGCTTGACTTGCAGCAACAAGTT | 58 |
| | ATTTACCCTC | |
| xAP306 | GAATTAAGCTTATTATAAGCCTAAGGCAGCTTGACTTGCAGCAACAAGTT | 59 |
| | TTTTTTACTCCTC | |
| xAP307 | GAATTAAGCTTATTATAAGCCTAAGGCAGCTTGACTTGCAGCAACAAGTT | 60 |
| | TTTTACCCTCCTCGGCTTAGCAGG | |
| xAP314 | CTCAAGAAACCTAGGAAAAGTGGGCAGC | 61 |

[0401] The following variants (fragments) were generated and binding to the shFcRn-GST was determined as described in Materials and Methods. More specifically, codons encoding amino acids at the C-terminal end of HSA were individually replaced with TAA (i.e. a translation stop codon) to generate the truncated HSA variants of Table 6. Binding data for the HSA variants binding to shFcRn are presented in Table 6, FIG. 20 and FIG. 21.

TABLE 6
SPR-derived kinetics for binding of HSA
truncation variants to shFcRn-GST.

| | Ka | kd | KD^{b} | KD^{c} |
|---|---|---|---|---|
| Albumin variant^{a} | (10³/Ms) | (10⁻³/s) | (μM) | (μM) |
| WT | 6.6 ± 0.1 | 9.1 ± 0.1 | 1.3 | 2.4 |
| 584Stop | 8.6 ± 0.0 | 32.0 ± 0.1 | 3.7 | ND |
| 582Stop | 13.0 ± 0.2 | 65.0 ± 0.0 | 5.0 | ND |
| 581Stop | 3.6 ± 0.0 | 32.0 ± 0.1 | 9.0 | ND |
| 580Stop | 9.8 ± 0.1 | 6.0 ± 0.0 | 6.1 | 13.2 |
| 579Stop | ND | ND | ND | 17.0 |
| 578Stop | ND | ND | ND | 19.9 |
| 577Stop | ND | ND | ND | 23.0 |
| 573Stop | ND | ND | ND | 14.1 |
| 572Stop | ND | ND | ND | 10.4 |
| 568Stop | ND | ND | ND | 23.0 |

^{a}Dilutions of HSA variants were injected over immobilized shFcRn (~2000 RU).
^{b}The kinetic rate constants were obtained using a simple first-order (1:1) bimolecular interaction model. The kinetic values represent the average of duplicates.
^{c}The steady state affinity constant was obtained using an equilibrium (Req) binding model supplied by the BIAevaluation 4.1 software.
^{d}Not determined (ND).

[0402] The data of Table 6 and FIG. 20 show the importance of the C-terminus of HSA in pH dependent binding to shFcRn. Surprisingly, removal of the last amino acid (Leu585) reduced binding to the receptor by 50% compared to WT HSA and further truncation increased the effect (FIG. 20).

[0403] Similarly, the general trend in reduced affinity with an increase in truncation length is observed in a competitive binding assay (FIG. 21). i.e. competition was progressively reduced with removal of more amino acids.

[0404] Determination of KDs shows the dramatic impact of C-terminal truncations (Table 4).

### Example 5. Alterations in the C-Terminal End of HSA Modulates Binding to shFcRn

[0405] Expression constructs of HSA mutants (Table 7, below) were generated by PCR and gap-repair. This was achieved by generating PCR products using Phusion Polymerase (New England Biolabs), according to the manufacturer's instruction, using pDB3927 as a template and oligonucleotides (Table 7 and 8). Each PCR-fragment was digested with AvrII/Bsu36I, purified (Qiagen PCR-clean up kit (according to the manufacturer's instructions)) and ligated into AvrII/Bsu36I-digested pDB3927. Ligations were transformed into E. coli DH5α, subsequently plasmids were isolated from transformants (Qiagen miniprep kit (according to the manufacturer's instructions)) and the correct constructs were identified by sequencing.

TABLE 7
Alterations in the C-terminal end of HSA

| | SEQ ID No. | Oligonucleotide | |
|---|---|---|---|
| Molecule | (molecule) | pair | Plasmid |
| HSA K574A | 62 | xAP314/xAP309 | pDB4536 |
| HSA Q580A | 63 | xAP314/xAP308 | pDB4535 |
| HSA K573P/Q580A | 64 | xAP314/xAP311 | pDB4537 |

TABLE 8
Oligonucleotide sequences for preparation
alterations in the C-terminal end of HSA

| Oligo- | | SEQ |
|---|---|---|
| nucleotide | Sequence (5′-3′) | ID No: |
| xAP308 | GAATTAAGCTTATTATAAGCCTAAGGCAGCAGC | 65 |
| | ACTTGCAGCAACAAG | |
| xAP309 | GAATTAAGCTTATTATAAGCCTAAGGCAGCTTG | 66 |
| | ACTTGCAGCAACAAGAGCTTTACCCTC | |
| xAP311 | GAATTAAGCTTATTATAAGCCTAAGGCAGCAGC | 67 |
| | ACTTGCAGCAACAAGTTTTGGACCCTCC | |
| xAP314 | CTCAAGAAACCTAGGAAAAGTGGGCAGC | 61 |

[0406] Plasmids, pDB4535 to pDB4537, containing the desired substitutions (Table 7) were digested with NsiI/PvuI, the DNA was purified (Qiagen PCR Purification kit as per the manufacturer's instructions), before being used, along with Acc65I/BamHI-digested pDB3936, to co-transform S. cerevisiae BXP10cir⁰ as described above generating expression plasmids in the yeast by gap-repair. Stocks were prepared for each resultant yeast strain as described above.

[0407] The following variants were generated and binding affinity to the shFcRn-GST was determined as described in Materials and Methods. The results are presented in Table 9 and FIG. 22.

TABLE 9
SPR-derived kinetics for binding of HSA variants to shFcRn-GST.

| | Ka | kd | KD^{b} | KD^{c} |
|---|---|---|---|---|
| Albumin variant^{a} | (10³/Ms) | (10⁻³/s) | (μM) | (μM) |
| WT | 6.6 ± 0.1 | 9.1 ± 0.1 | 1.3 | 2.4 |
| K574A | 5.2 ± 0.1 | 9.9 ± 0.0 | 1.9 | ND^{d} |
| Q580A | 3.5 ± 02 | 18.0 ± 0.1 | 5.1 | ND |
| K573P/Q580A | 4.1 ± 0.1 | 2.0 ± 0.0 | 0.4 | ND |

^{a}Dilutions of HSA variants were injected over immobilized shFcRn (~2000 RU).
^{b}The kinetic rate constants were obtained using a simple first-order (1:1) bimolecular interaction model. The kinetic values represent the average of duplicates.
^{c}The steady state affinity constant was obtained using an equilibrium (Req) binding model supplied by the BIAevaluation 4.1 software.
^{d}Not determined (ND).

[0408] The data provide further evidence of the importance of the C-terminal end of HSA in pH dependent binding to shFcRn. Alanine substitutions of Q580 and K574 were shown to reduce the binding affinity by approximately 2 and 4 fold, respectively (FIG. 22 and Table 5). A double mutant (combining K573P with Q580A) gave rise to improved affinity for shFcRn. Taken together, the data of Examples 4 and 5 show the importance of amino acids in the last α-helix of DIIIb for binding of albumin to shFcRn.

### Example 6. SPR Analysis of Binding Affinity of Albumin Variants to shFcRn

[0409] Variants of albumin were generated according to the methods below.

### Preparation of Specific HSA Mutein Expression Plasmids.

[0410] HSA variants were expressed using several standard molecular biology techniques, such as described in Sambrook, J. and D. W. Russell, 2001 (Molecular Cloning: a laboratory manual, 3rd ed. Cold Spring Harbor Laboratory Press, Cold Spring Harbor, N.Y). Described below are two methods employed to introduce mutations within the HSA sequence, depending on the proximity of suitable restriction sites in the plasmid encoding WT HSA, pDB3964 (described in WO2010/092135, incorporated herein by reference).

### Method 1:

[0411] Where restriction sites proximal to the desired mutation existed, mutagenic oligonucleotides were designed, incorporating both the desired change and relevant restriction sites (Tables 10 and 11). The relevant primers were employed in the PCR reaction (described in Tables 12 and 13), utilising the New England Biolabs Phusion kit and pDB3964 as template. The resulting products were purified (QIAquick PCR Purification Kit, according to the manufacturer's instructions). The products were digested with appropriate restriction enzymes (Table 10) and purified (QIAquick Gel Extraction Kit (according to the manufacturer's instructions)). The resulting fragments were ligated into appropriately digested pDB3964 such that the WT HSA sequence was substituted with the HSA sequence containing the desired mutation. Ligations were transformed into E. coli DH5α cells and plasmids were isolated (Qiagen Plasmid Plus Kit (according to the manufacturer's instructions)). All plasmids were sequenced to confirm that the HSA sequence was only mutated at the desired position(s).

TABLE 10
Plasmid and amino acid substitution and relevant primers (see also Table 2)

| | | | | Restriction | Digested | |
|---|---|---|---|---|---|---|
| | SEQ ID No. | | | enzyme | fragment | Plasmid |
| Mutant | (mutant) | Oligo 1 | Oligo 2 | digest plan | size (kb) | name |
| HSA N503D | 69 | xAP452 | xAP453 | SalI/Bsu36I | 0.269 | pDB4703 |
| HSA E505Q | 70 | xAP453 | xAP491 | SalI/Bsu36I | 0.269 | pDB4704 |
| HSA H510D | 71 | xAP455 | xAP453 | SalI/Bsu36I | 0.269 | pDB4705 |
| HSA H510E | 72 | xAP456 | xAP453 | SalI/Bsu36I | 0.269 | pDB4706 |
| HSA D512E | 73 | xAP457 | xAP453 | SalI/Bsu36I | 0.269 | pDB4707 |
| HSA D512A | 74 | xAP458 | xAP453 | SalI/Bsu36I | 0.269 | pDB4708 |
| HSA E565V | 75 | xAP472 | xAP473 | SalI/Bsu36I | 0.269 | pDB4709 |
| HSA A569V | 76 | xAP472 | xAP481 | SalI/Bsu36I | 0.269 | pDB4710 |
| HSA A569L | 77 | xAP472 | xAP482 | SalI/Bsu36I | 0.269 | pDB4711 |
| HSA V576F | 78 | xAP472 | xAP489 | SalI/Bsu36I | 0.269 | pDB4712 |
| HSA R410A | 79 | xAP441 | xAP442 | NcoI/BamHI | 0.562 | pDB4713 |
| HSA Y411A | 80 | xAP441 | xAP443 | NcoI/BamHI | 0.562 | pDB4714 |
| HSA P416A | 81 | xAP441 | xAP444 | NcoI/BamHI | 0.562 | pDB4715 |
| HSA E425A | 82 | xAP441 | xAP445 | NcoI/BamHI | 0.562 | pDB4716 |
| HSA E425K | 83 | xAP441 | xAP446 | NcoI/BamHI | 0.562 | pDB4717 |
| HSA K524A | 84 | xAP449 | xAP459 | AvrlI/SacI | 0.308 | pDB4718 |
| HSA K525A | 85 | xAP449 | xAP460 | AvrlI/SacI | 0.308 | pDB4719 |
| HSA K534V | 86 | xAP453 | xAP463 | SacI/Bsu36I | 0.151 | pDB4749 |
| HSA H535F | 87 | xAP453 | xAP471 | SacI/Bsu36I | 0.151 | pDB4720 |
| HSA N503K | 88 | xAP493 | xAP453 | SalI/Bsu36I | 0.269 | pDB4737 |
| HSA E505K | 89 | xAP492 | xAP453 | SalI/Bsu36I | 0.269 | pDB4738 |
| HSA A569S | 90 | xAP472 | xAP494 | SalI/Bsu36I | 0.269 | pDB4740 |
| HSA K466A | 91 | xAP449 | xAP450 | AvrlI/SalI | 0.19 | pDB4751 |
| HSA D471A | 92 | xAP449 | xAP451 | AvrlI/SalI | 0.19 | pDB4741 |
| HSA R472A | 93 | xAP449 | xAP490 | AvrlI/SalI | 0.19 | pDB4742 |
| HSA T527D | 94 | xAP449 | xAP461 | AvrlI/SacI | 0.308 | pDB4752 |
| HSA T527M | 95 | xAP449 | xAP495 | AvrlI/SacI | 0.308 | pDB4753 |
| HSA T527A | 96 | xAP449 | xAP496 | AvrlI/SacI | 0.308 | pDB4754 |
| HSA K190A | 97 | xAP437 | xAP438 | SaclI/NheI | 0.395 | pDB4755 |
| HSA R197A | 98 | xAP439 | xAP440 | NheI/NcoI | 0.167 | pDB4748 |

TABLE 11
Mutagenic oligonucleotides

| | | SEQ |
|---|---|---|
| Oligo | Sequence (5′ to 3′) | ID No. |
| xAP437 | TGAGTCCGCGGAAAATTGTGACAAATC | 99 |
| xAP438 | GCAGAGCTAGCAGCCCCTTCATCCCGAAG | 100 |
| xAP439 | GGAAGGCTAGCTCTGCCAAACAGGCTCTCAAGTGTGCC | 101 |
| xAP440 | GATCTCCATGGCAGCATTCCGTGTGG | 102 |
| xAP441 | TGCTGCCATGGAGATCTGCTCGAGTGTGC | 103 |
| xAP442 | CATTTGGATCCCACTTTTCCTAGGTTTCTTGAGACCTCTACAAGAGTTGGA | 104 |
| | GTTGACACTTGGGGTACTTTCTTGGTGTAAGCAACTAATAGCGC | |
| xAP443 | CATTTGGATCCCACTTTTCCTAGGTTTCTTGAGACCTCTACAAGAGTTGGA | 105 |
| | GTTGACACTTGGGGTACTTTCTTGGTAGCACGAACTAATAGC | |
| xAP444 | CATTTGGATCCCACTTTTCCTAGGTTTCTTGAGACCTCTACAAGAGTTGGA | 106 |
| | GTTGACACTTGAGCTACTTTCTTGG | |
| xAP445 | CATTTGGATCCCACTTTTCCTAGGTTTCTTGAGACAGCTACAAGAGTTGG | 107 |
| xAP446 | CATTTGGATCCCACTTTTCCTAGGTTTCTTGAGACTTTTACAAGAGTTGG | 108 |
| xAP449 | AGAAACCTAGGAAAAGTGGGATCCAAATG | 109 |
| xAP450 | TTTCGTCGACTTCCAGAGCTGAAAAGCATGGTCGCCTGTTCACCAAGGAT | 110 |
| | TCTGTGCAGCATTTGGTGACTCTGTCACTTACTGGCGTAGCCTCATGC | |
| xAP451 | GTTTCGTCGACTTCCAGAGCTGAAAAGCATGGTCGCCTGTTCACCAAGGA | 111 |
| | TTCTGTGCAGCATTTGGTGACTCTAGCACTTACTGGCG | |
| xAP452 | CTCTGGAAGTCGACGAAACATACGTTCCCAAAGAGTTTGATGCTGAAACA | 112 |
| | TTCAC | |
| xAP453 | TATTATAAGCCTAAGGCAGCTTGACTTGCAG | 113 |
| xAP455 | CTCTGGAAGTCGACGAAACATACGTTCCCAAAGAGTTTAATGCTGAAACAT | 114 |
| | TCACCTTCGATGCAGATATATGC | |
| xAP456 | CTCTGGAAGTCGACGAAACATACGTTCCCAAAGAGTTTAATGCTGAAACAT | 115 |
| | TCACCTTCGAAGCAGATATATGC | |
| xAP457 | CTCTGGAAGTCGACGAAACATACGTTCCCAAAGAGTTTAATGCTGAAACAT | 116 |
| | TCACCTTCCATGCAGAAATATGCACAC | |
| xAP458 | CTCTGGAAGTCGACGAAACATACGTTCCCAAAGAGTTTAATGCTGAAACAT | 117 |
| | TCACCTTCCATGCAGCTATATGCACAC | |
| xAP459 | TTCACGAGCTCAACAAGTGCAGTTTGTTTAGCGATTTGTCTCTCCTTCTC | 118 |
| xAP460 | TTCACGAGCTCAACAAGTGCAGTTTGAGCCTTGATTTGTCTCTCCTTCTC | 119 |
| xAP461 | TTCACGAGCTCAACAAGTGCATCTTGTTTCTTG | 120 |
| xAP463 | TTGTTGAGCTCGTGGTTCACAAGCCCAAG | 121 |
| xAP471 | TTGTTGAGCTCGTGAAATTTAAGCCCAAGG | 122 |
| xAP472 | CTGGAAGTCGACGAAACATACGTTCCC | 123 |
| xAP473 | ATAAGCCTAAGGCAGCTTGACTTGCAGCAACAAGTTTTTTACCCTCCTCG | 124 |
| | GCAAAGCAGGTAACCTTATCGTCAG | |
| xAP481 | ATAAGCCTAAGGCAGCTTGACTTGCAGCAACAAGTTTTTTACCCTCCTCAA | 125 |
| | CAAAGCAGGTC | |
| xAP482 | ATAAGCCTAAGGCAGCTTGACTTGCAGCAACAAGTTTTTTACCCTCCTCCA | 126 |
| | AAAAGCAGGTC | |
| xAP489 | ATAAGCCTAAGGCAGCTTGACTTGCAGCAAAAAGTTTTTTACC | 127 |
| xAP490 | GTTTCGTCGACTTCCAGAGCTGAAAAGCATGGTCGCCTGTTCACCAAGGA | 128 |
| | TTCTGTGCAGCATTTGGTGACAGCGTCACTTACTG | |
| xAP491 | TGGAAGTCGACGAAACATACGTTCCCAAAGAGTTTAATGCTCAAACATTCA | 129 |
| | CC | |
| xAP492 | TGGAAGTCGACGAAACATACGTTCCCAAAGAGTTTAATGCTAAAACATTCA | 130 |
| | CCTTCCATG | |
| xAP493 | TGGAAGTCGACGAAACATACGTTCCCAAAGAGTTTAAAGCTGAAACATTCA | 131 |
| | CCTTCCATG | |
| xAP494 | ATAAGCCTAAGGCAGCTTGACTTGCAGCAACAAGTTTTTTACCCTCCTCAG | 132 |
| | AAAAGCAGGTCTCCTTATC | |
| xAP495 | GTTTCACGAGCTCAACAAGTGCCATTTGTTTCTTGATTTGTCTCTCCTTC | 133 |
| xAP496 | GTTTCACGAGCTCAACAAGTGCAGCTTGTTTCTTGATTTGTCTCTCCTTC | 134 |

TABLE 12
PCR reaction components

| | | | | | |
|---|---|---|---|---|---|
| HF buffer (5x) | 20 | μl | template DNA (5 ng/μl) | 2 | μl |
| dNTP (10 mM) | 2 | μl | Phusion (polymerase) | 1 | μl |
| oligo 1 (10 mM) | 2 | μl | dH₂O | 71 | μl |

| | | |
|---|---|---|
| oligo 2 (10 mM) | 2 | μl |

TABLE 13
PCR reaction conditions

| | | |
|---|---|---|
| Temperature | Cycle length | Number of cycles |

| | | | |
|---|---|---|---|
| 98° C. | 2 | min | 1 |
| 98° C. | 10 | sec | 35 |
| 55° C. | 30 | sec | |
| 72° C. | 20 | sec | |
| 72° C. | 10 | min | 1 |

### Method 2.

[0412] If suitable restriction sites were not present in the vicinity of a desired mutation, synthetic DNA fragments were produced by gene assembly (GeneArt, Life Technologies) and were designed to contain mutation(s) within the HSA gene and suitable restriction sites for insertion into the plasmid encoding wild type HSA, pDB3964, such that the nucleotide sequence of the synthetic fragment encoding unchanged amino acids was identical to those in pDB3964 (see Table 14 and 15). The synthetic constructs were digested with the restriction enzymes designated in Table 14, the desired fragments were purified (QIAquick Gel Extraction Kit) and ligated into appropriately digested pDB3964 such that the WT HSA sequence was substituted with the HSA sequence containing the desired mutation. The ligated plasmids were transformed into E. coli DH5α cells and plasmids were isolated (Qiagen Plasmid Plus Kit (according to the manufacturer's instructions)). All plasmids were sequenced to confirm that the HSA sequence was only mutated at the desired position(s).

TABLE 14
Plasmid and amino acid substitution

| | | Digested | | |
|---|---|---|---|---|
| | Restriction | fragment size | | SEQ ID No. |
| Mutant | enzymes | (kb) | Plasmid | (mutant) |
| HSA E531H | SalI/Bsu36I | 0.269 | pDB4739 | 166 |
| HSA E531A | SalI/Bsu36I | 0.269 | pDB4750 | 167 |
| HSA D108A | SaclI/NheI | 0.395 | pDB4743 | 168 |
| HSA N111K | SaclI/NheI | 0.395 | pDB4744 | 169 |
| HSA N111D | SaclI/NheI | 0.395 | pDB4745 | 170 |
| HSA N111G | SaclI/NheI | 0.395 | pDB4746 | 171 |
| HSA N111H | SaclI/NheI | 0.395 | pDB4747 | 172 |
| HSA K276N | Ncol/BamHI | 0.562 | pDB4756 | 173 |
| HSA N111R | SaclI/NheI | 0.395 | pDB4860 | 174 |
| HSA N111Q | SaclI/NheI | 0.395 | pDB4861 | 175 |
| HSA N111E | SaclI/NheI | 0.395 | pDB4862 | 176 |
| HSA N109D | SaclI/NheI | 0.395 | pDB4866 | 177 |
| HSA N109E | SaclI/NheI | 0.395 | pDB4867 | 178 |
| HSA N109Q | SaclI/NheI | 0.395 | pDB4868 | 179 |
| HSA N109R | SaclI/NheI | 0.395 | pDB4869 | 180 |
| HSA N109K | SaclI/NheI | 0.395 | pDB4870 | 181 |
| HSA N109H | SaclI/NheI | 0.395 | pDB4871 | 182 |
| HSA N109G | SaclI/NheI | 0.395 | pDB4872 | 183 |
| HSA D108E | SaclI/NheI | 0.395 | pDB4873 | 184 |
| HSA T83N | SaclI/NheI | 0.395 | pDB4874 | 156 |
| HSA L575F | SaclI/Bsu36I | 0.269 | pDB4875 | 68 |

TABLE 15
Codons used to introduce amino acid
substitutions into HSA.

| Amino acid | Codon |
|---|---|
| Gly | GGT |
| Glu | GAA |
| Asp | GAT |
| Val | GTT |
| Ala | GCT |
| Arg | AGA |
| Lys | AAA |
| Asn | AAT |
| Met | ATG |
| Ile | ATT |
| Thr | ACT |
| Trp | TGG |
| Cys | TGT |
| Tyr | TAT |
| Leu | TTG |
| Phe | TTT |
| Ser | TCT |
| Gln | CAA |
| His | CAT |
| Pro | CCA |
| Stop | TAA |

Production of Combination Mutants with K573P

[0413] Combination mutants (Table 16) were produced to combine a subset of the mutations described in Tables 10 and 14 with the HSA K573P variant (plasmid pDB4110). The 0.358 kb fragment encoding the K573P variant DNA, was isolated from plasmid pDB4110 by digestion with the SacI/SphI restriction enzymes, purified using a QIAquick Gel Extraction Kit and ligated into pDB4704, pDB4716 and pDB4753 (see Table 10) digested with the same enzymes, to produce HSA variants E505Q/K573P, E425A/K573P and T527M/K573P, respectively. Further combination mutants were prepared by digestion of pDB4110 with the NaeI/NcoI restriction enzymes, isolation as described above and ligation of equivalent fragments from pDB4745, pDB4746 and pDB4747 (described in Table 14) to produce combination mutants N111D/K573P, N111G/K573P and N111H/K573P, respectively. To produce the K534V/K573P mutant, synthetic DNA was produced containing both desired mutations by gene assembly (GeneArt, Life Technologies). The fragment was digested via the SalI/Bsu36I restriction sites, isolated as described above and ligated into appropriately digested pDB3964. To produce combination mutants N111R/K573P, N111Q/K573P and N111E/K573P, fragments containing the N111 mutations were removed from GeneArt constructs via the SaclI/NheI restriction sites and cloned into appropriately digested pDB3964 containing the SacI/SphI fragment of pDB4110, encoding the K573P mutation (designated pDB4852) as described above. The ligated plasmids were transformed into E. coli cells and plasmids were then isolated (Qiagen Plasmid Plus Kit (according to the manufacturer's instructions)). All plasmids underwent sequencing to confirm that the HSA sequence was only mutated at the desired positions.

TABLE 16
Combination mutants.

| | SEQ ID No. of | |
|---|---|---|
| Mutant | HSA mutant | Plasmid |
| E425A/K573P | 135 | pDB4849 |
| T527M/K573P | 136 | pDB4850 |
| E505Q/K573P | 137 | pDB4851 |
| N111D/K573P | 138 | pDB4853 |
| N111G/K573P | 139 | pDB4854 |
| N111H/K573P | 140 | pDB4855 |
| N111R/K573P | 141 | pDB4863 |
| N111Q/K573P | 142 | pDB4864 |
| N111E/K573P | 143 | pDB4865 |
| K534V/K573P | 144 | pDB4876 |

### Production of Expression Plasmid and Yeast Stocks

[0414] Preparation of the expression plasmids and transformation of S. cerevisiae was performed as described above, with the modification that cells were plated and subsequently patched onto BMMD plates supplemented with 0.69 g/L CSM-Leu (MP Biomedicals).

[0415] Stocks were prepared either by the 48 hour method described above (pDB4703-pDB4720, pDB4737-pDB4756, pDB4849-pDB4855) or the 24 hour method described in WO 2011/051489 (pDB4860-pDB4876), with the modification that BMMS broth (0.17% (w/v) yeast nitrogen base without amino acid and ammonium sulphate (Difco), 37.8 mM ammonium sulphate, 36 mM citric acid, 126 mM disodium hydrogen orthophosphate pH6.5, 2% (w/v) sucrose, adjusted to pH 6.5 with NaOH) was used in both cases.

### SPR Analysis

[0416] SPR analyses were performed on a Biacore 3000 instrument (G E Healthcare). Immobilisation was carried out on CM5 chips coupled with shFcRn (GeneArt 1025291) using GE Healthcare amine coupling chemistry as per manufacturer's instructions. Immobilised levels of shFcRn-HIS were 1500-2500RU and achieved by injecting 5-10 μg/mL shFcRn into sodium acetate pH5.0 (G E Healthcare). Chip surface was left to stabilize with a constant flow (5 μL/min) of running buffer—HBS-EP buffer (0.01 M HEPES, 0.15 M NaCl, 3 mM EDTA, 0.005% surfactant P20) at pH 7.4 (GE Healthcare))) at 25° C. for ˜1-2 hours. After ligand stabilization, the chip surface was primed (×2) with Di-basic/Mono-basic phosphate buffer pH5.5 and conditioned by injecting 5-12×45 μL Di-basic/Mono-basic phosphate buffer at 30 μL/min followed by HBS_EP regeneration steps (12s) in between each injection. Surfaces were then checked for activity by injecting 3×45 μL positive control at 30 μL/min, followed by 12s regeneration pulse. Kinetic measurements were performed by injecting dilutions (100 μM-1 μM) of HSA and HSA variants at 30 μL/min over immobilised shFcRn, at 25° C. The reference cell value was then subtracted and Biaevaluation software 4.1 used to obtain kinetic data and confirm KD values.

[0417] The variants were albumin (SEQ ID NO: 2), each with one point mutation selected from: D108A, N111D, N111G, N111H, N111K, K190A, R197A, K276N, R410A, Y411A, P416A, E425A, E425K, K466A, D471A, R472A, N503D, N503K, E505K, E505Q, H510D, H510E, D512A, D512E, K524A, K525A, T527A, T527D, T527M, E531A, E531H, K534V, H535F, E565V, A569L, A569S, A569V, and V576F.

[0418] Firstly, the variants were analysed by SPR to determine their binding response (RU) to shFcRn. Only variants showing a binding response more than 20% higher or lower than the binding response of wild-type albumin were analysed to identify the KD (Table 18, below). Wild-type HSA and HSA with mutation K573P were used as controls.

TABLE 18
Binding affinity of albumin variants to shFcRn-HIS

| Molecule | Ka (10³/Ms) | Kd (10⁻³/s) | KD (μM) |
|---|---|---|---|
| WT HSA | — | — | 3.1 ± 0.4 * |
| HSA_K573P | — | — | 0.4 ± 0.1 * |
| E505Q | 2.1 | 2.9 | 1.4 |
| N111D | 0.8 | 4.4 | 5.2 |
| T527M | 2.7 | 3.3 | 1.2 |
| N111G | 1.6 | 5.2 | 3.3 |
| N111H | 0.5 | 2.4 | 5.0 |
| D512E | 2.7 | 10.9 | 4.1 |
| K524A | 3.3 | 11.6 | 3.5 |
| T527A | 2.6 | 13.7 | 5.2 |
| E531H | 3.5 | 20.8 | 6.2 |
| N111K | 0.5 | 8.3 | 17.3 |
| E425K | 3.6 | 12.4 | 3.5 |
| K534V | 4.8 | 5.5 | 1.1 |
| H510D | 0.2 | 0.4 | 2.0 |
| A569S | 0.7 | 4.8 | 6.8 |
| D108A | 0.9 | 12.7 | 13.7 |

* Mean of five repeats, therefore Ka and Kd data are not provided

[0419] Variants with a lower KD than wild-type HSA have a higher binding affinity to shFcRn. Conversely, variants with a higher KD than wild-type HSA have a lower binding affinity to shFcRn.

[0420] The data for positions 108 and 111 support the involvement of a loop including positions 105 to 120 in interaction with FcRn and therefore predicts that alteration at any position within this loop will modulate the binding affinity of albumin to FcRn.

### Example 7. SPR Analysis of Binding Affinity of Albumin Variants to shFcRn-HIS

[0421] The variants were albumin (SEQ ID NO: 2), each with one point mutation selected from: N111D, N111G, N111H, N111D/K573P, N111G/K573P, N111H/K573P, E505Q, E425A, T527M, E505Q/K573P, E425A/K573P and T527M/K573P were prepared as described above.

TABLE 19
Binding affinity of albumin variants to shFcRn-HIS

| Molecule | Ka (10³/Ms) | | Kd (10⁻³/s) | | KD (μM) | |
|---|---|---|---|---|---|---|
| WT rHSA | — | | — | | 3.6 ± 0.54* | |
| rHSA_K573P | — | | — | | 0.6 ± 0.12** | |
| N111D | 9.8 | 9.1 | 17.9 | 17.9 | 1.8 | 2.0 |
| N111G | 7.4 | 7.4 | 20.5 | 19.2 | 2.7 | 2.6 |
| N111H | 4.4 | 4.0 | 15.6 | 14.2 | 3.5 | 3.6 |
| N111D-K573P | 4.0 | 4.2 | 1.9 | 2.2 | 0.5 | 0.5 |
| N111G-K573P | 4.1 | 4.7 | 1.7 | 2.3 | 0.4 | 0.5 |
| N111H-K573P | 2.9 | 3.0 | 1.7 | 2.2 | 0.6 | 0.7 |
| E505Q | 5.1 | 5.0 | 4.9 | 6.0 | 1.0 | 1.2 |
| E425A | 6.6 | 7.9 | 34.1 | 28.1 | 5.1 | 3.6 |
| T527M | 4.9 | 4.8 | 4.4 | 5.1 | 0.9 | 1.1 |
| E425A-K573P | 3.4 | 3.6 | 2.5 | 3.2 | 0.7 | 0.9 |
| E505Q-K573P | 0.4 | 0.4 | 0.5 | 1.1 | 1.6 | 2.5 |
| T527M-K573P | 2.6 | 2.8 | 1.2 | 2.2 | 0.5 | 0.8 |

*Mean of 8 and standard deviation
**Mean of 5 and standard deviation.

Variants with a lower KD than wild-type HSA have a higher binding affinity to shFcRn. Conversely, variants with a higher KD than wild-type HSA have a lower binding affinity to shFcRn.

[0422] The data for including K573P generate increases in affinity consistent with the K573P substitution only.

### Example 8. SPR Analysis of Binding Affinity of Albumin Variants to shFcRn-HIS

[0423] The variants were albumin (SEQ ID NO: 2), each with one point mutation selected from: N111R, N111Q, N111E, N111R/K573P, N111Q/K573P, N111E/K573P, N109D, N109E, N109Q, N109R, N109K, N109H, N109G, D108E, T83N, L575F and K534V/K573P were prepared as described above.

TABLE 20
Binding affinity of albumin variants to shFcRn-HIS

| Molecule | Ka (10³/Ms) | | Kd (10⁻³/s) | | KD (μM) | |
|---|---|---|---|---|---|---|
| WT rHA | — | | — | | 2.0 ± 0.3* | |
| rHA_K573P | — | | — | | 0.3 ± 0.0** | |
| N111E | 15.3 | 14.3 | 13.1 | 15.2 | 0.8 | 1.1 |
| N111E-K573P | 4.2 | — | 2.4 | — | 0.6 | — |
| N109K | 9.7 | 6.3 | 18.3 | 21.6 | 1.9 | 3.4 |
| D108E | 13.9 | 7.5 | 16.6 | 19.5 | 1.2 | 2.6 |
| T83N | 17.7 | 15.2 | 15.6 | 16.8 | 0.9 | 1.1 |
| L575F | 11.8 | 8.3 | 31.3 | 32.2 | 2.7 | 4.0 |
| K534V-K573P | 4.7 | 4.5 | 6.9 | 6.9 | 1.5 | 1.5 |

*Mean of 11 and standard deviation
**Mean of 5 and standard deviation.

The data demonstrate a role for the 108-111 loop in binding of HSA to FcRn, with reduced binding affinity observed in the D108A and N111K variants (Table 18). Additional mutations at position 111 demonstrated a range of binding affinities, from the reduced affinity observed for the N111K variant through to the N111E variant, which displayed an increased affinity for FcRn as compared to WT HSA (Table 20). Variant N111Q/K573P (FIG. 23) shows a binding curve with increased response and reduced dissociation consistent with the K573P substitution. The relative position of loop region 108-112 of HSA and FcRn (FIG. 24) suggests that this region has potential to contribute to FcRn binding as predicted in Example 6.

[0424] The relative position of adjacent loop region of Domain 1, comprising residues 78-88 (FIG. 24), suggests that this region has potential to contribute to FcRn binding. This is supported by the observation that the T83N variant shows increased affinity for FcRn compared to WT HSA (Table 20).

[0425] Mutation of the adjacent residues, particularly E82, P110 and L112 (FIG. 24), would be predicted to alter the binding affinity of HSA for FcRn.

[0426] The invention described and claimed herein is not to be limited in scope by the specific aspects herein disclosed, since these aspects are intended as illustrations of several aspects of the invention. Any equivalent aspects are intended to be within the scope of this invention. Indeed, various modifications of the invention in addition to those shown and described herein will become apparent to those skilled in the art from the foregoing description. Such modifications are also intended to fall within the scope of the appended claims. In the case of conflict, the present disclosure including definitions will control.

### Preferred Embodiments

[0427] 1. A method for preparing a polypeptide which is a variant of albumin, fragment thereof or fusion polypeptide comprising said variant albumin or fragment thereof having a binding affinity to FcRn which is altered compared to the binding affinity of a reference albumin, fragment or fusion thereof to FcRn, comprising:

[0428] (a) providing a nucleic acid encoding a parent albumin having at least 80% sequence identity to SEQ ID NO: 2;

[0429] (b) modifying the sequence of step (a), to encode a polypeptide which is a variant albumin, fragment thereof or fusion polypeptide comprising said variant albumin or fragment thereof having one or more alterations at one or more position corresponding to positions in SEQ ID NO: 2 selected from: (a) any of 75 to 91 (preferably 83); (b) any of 492 to 538; (c) 505, 531, 524, 472, 108, 190, 197 and 425; (d) any of 186 to 201; (e) any of 457 to 472; (f) any of 414 to 426; (g) any of 104 to 120; (h) any of 144 to 150; (i) any of 30 to 41, (j) any of 550 to 585, (k) any of 276, 410 and 414 with one or more of A, C, D, E, F, G, H, I, K, L, M, N, P, Q, R, S, T, V, W, Y; wherein

[0430] when the polypeptide comprises one or more alterations selected from:
[0431] (i) the group consisting of positions 417, 464, 492, 493, 494, 495, 496, 499, 500, 501, 503, 504, 505, 506, 510, 535, 536, 537, 538, 540, 550, 573, 574, 575, 577, 578, 579, 580, 581, 582 and 584;
[0432] (ii) insertion of or substitution with a Cys at one or more (several) of the group consisting of positions 34, 38, 40, 75, 76, 80, 82, 83, 86, 90, 104, 113, 115, 116, 471, 496, 498, 501, 503, 504, 505, 506, 512, 538, 550, 560, 562, 564, 565, 573, 574, 577, 578, 579, 580, 581, 582, 584, 585;
[0433] (iii) alteration at one or more (several) of positions 91, 200, 461, 514, 558, 559, 567 to break a disulphide bond, and/or
[0434] (iv) D63N, E82K, E84K, D87N, L90P, K106E, R114G, E119K, V146E, H464A, H464N, C201F, D494N, E501K, E503K, E505K, H510A, I513N, D518N, K525E, E529K, V533M, H535A, K536E, I537N, D550G, D550A, V557M, K560E, D563N, E565K, E570K, K573E, K574N, K574E, K584E; the polypeptide also comprises one or more alterations at a position selected from group consisting of positions 30, 31, 32, 33, 34, 35, 36, 37, 38, 39, 40, 41, 75, 76, 77, 78, 79, 80, 81, 82, 83, 84, 85, 86, 87, 88, 89, 90, 91, 104, 105, 106, 107, 108, 109, 110, 111, 112, 113, 114, 115, 116, 117, 118, 119, 120, 144, 145, 146, 147, 148, 149, 150, 186, 187, 188, 189, 190, 191, 192, 193, 194, 195, 196, 197, 198, 199, 200, 201, 276, 410, 411, 414, 415, 416, 418, 419, 420, 421, 422, 423, 424, 425, 426, 457, 458, 459, 460, 461, 462, 463, 465, 466, 467, 468, 469, 470, 471, 472, 497, 498, 502, 507, 508, 509, 511, 512, 513, 514, 515, 516, 517, 518, 519, 520, 521, 522, 523, 524, 525, 526, 527, 528, 529, 530, 531, 532, 533, 534, 551, 552, 553, 554, 555, 556, 557, 558, 559, 560, 561, 562, 563, 564, 565, 567, 568, 569, 570, 571, 572, 576, 583, 585 and/or a stop codon inserted or substituted at a position selected from 497 to 585;

[0435] (c) introducing the modified sequence of step (b) in a suitable host cell;

[0436] (d) growing the cells in a suitable growth medium under condition leading to expression of the polypeptide; and

[0437] (e) recovering the polypeptide from the growth medium;

[0438] wherein the polypeptide has an altered binding affinity to FcRn and/or an altered plasma half-life compared with the half-life of a parent albumin, reference albumin, fragment thereof or fusion polypeptide comprising said parent albumin, reference albumin or fragment or fusion thereof.

2. The method of paragraph 1, wherein when the polypeptide comprises one or more alterations selected from (ii) the group consisting of positions 34, 38, 40, 75, 76, 80, 82, 83, 86, 90, 91, 104, 113, 115, 116, 200, 461, 471, 496, 498, 501, 503, 504, 505, 506, 512, 514, 538, 550, 558, 559, 560, 562, 564, 565, 567, 573, 574, 577, 578, 579, 580, 581, 582, 584, 585, or the group consisting of positions 82, 114, 119, 464, 201, 505, 510, 513, 533, 535, 536, 550, 560, 563, 565, 573, 574; the polypeptide also comprises one or more alterations at a position selected from group consisting of positions 30, 31, 32, 33, 35, 36, 37, 39, 41, 77, 78, 79, 81, 84, 85, 87, 88, 89, 105, 106, 107, 108, 109, 110, 111, 112, 117, 118, 120, 144, 145, 146, 147, 148, 149, 150, 186, 187, 188, 189, 190, 191, 192, 193, 194, 195, 196, 197, 198, 199, 201, 276, 410, 411, 414, 415, 416, 418, 419, 420, 421, 422, 423, 424, 425, 426, 457, 458, 459, 460, 462, 463, 465, 466, 467, 468, 469, 470, 472, 497, 502, 507, 508, 509, 511, 513, 515, 516, 517, 518, 519, 520, 521, 522, 523, 524, 525, 526, 527, 528, 529, 530, 531, 532, 534, 551, 552, 553, 554, 555, 556, 557, 561, 568, 569, 570, 571, 572, 576, 583 and/or a stop codon inserted or substituted at a position selected from 497 to 585.
3. The method according to paragraph 1, wherein the reference is HSA (SEQ ID No: 2) or a fragment thereof, or a fusion polypeptide comprising HSA or a fragment thereof, most preferably SEQ ID NO: 2.
4. The method of paragraph 1, wherein the alteration is a substitution.
5. A polypeptide which is a variant of albumin, fragments thereof or fusion polypeptide comprising said variant albumin or a fragment thereof having an altered binding affinity to FcRn compared with the binding affinity of a parent albumin, reference albumin, fragment thereof or fusion polypeptide comprising said parent albumin, reference albumin or fragment or fusion thereof to FcRn, the polypeptide comprising one or more alterations at one or more position corresponding to positions in SEQ ID NO: 2 selected from: (a) 75 to 91 (preferably 83); (b) 492 to 538; (c) 505, 531, 524, 472, 108, 190, 197 and 425; (d) 186 to 201; (e) 457 to 472; (f) 414 to 426; (g) 104 to 120; (h) 144 to 150; (i) 30 to 41; (j) 550 to 585, (k) any of 276, 410 and 414 with one or more of A, C, D, E, F, G, H, I, K, L, M, N, P, Q, R, S, T, V, W, Y; wherein

[0439] when the polypeptide comprises one or more alterations selected from:
[0440] (i) the group consisting of positions 417, 464, 492, 493, 494, 495, 496, 499, 500, 501, 503, 504, 505, 506, 510, 535, 536, 537, 538, 540, 550, 573, 574, 575, 577, 578, 579, 580, 581, 582 and 584;
[0441] (ii) insertion of or substitution with a Cys at one or more (several) of the group consisting of positions 34, 38, 40, 75, 76, 80, 82, 83, 86, 90, 104, 113, 115, 116, 471, 496, 498, 501, 503, 504, 505, 506, 512, 538, 550, 560, 562, 564, 565, 573, 574, 577, 578, 579, 580, 581, 582, 584, 585;
[0442] (iii) alteration at one or more (several) of positions 91, 200, 461, 514, 558, 559, 567 to break a disulphide bond; and/or
[0443] (iv) the group consisting of positions D63N, E82K, E84K, D87N, L90P, K106E, R114G, E119K, V146E, H464A, H464N, C201F, D494N, E501K, E503K, E505K, H510A, I513N, D518N, K525E, E529K, V533M, H535A, K536E, I537N, D550G, D550A, V557M, K560E, D563N, E565K, E570K, K573E, K574N, K574E, K584E;
   the polypeptide also comprises one or more alterations at a position selected from group consisting of positions 30, 31, 32, 33, 34, 35, 36, 37, 38, 39, 40, 41, 75, 76, 77, 78, 79, 80, 81, 82, 83, 84, 85, 86, 87, 88, 89, 90, 91, 104, 105, 106, 107, 108, 109, 110, 111, 112, 113, 114, 115, 116, 117, 118, 119, 120, 144, 145, 146, 147, 148, 149, 150, 186, 187, 188, 189, 190, 191, 192, 193, 194, 195, 196, 197, 198, 199, 200, 201, 276, 410, 411, 414, 415, 416, 418, 419, 420, 421, 422, 423, 424, 425, 426, 457, 458, 459, 460, 461, 462, 463, 465, 466, 467, 468, 469, 470, 471, 472, 497, 498, 502, 507, 508, 509, 511, 512, 513, 514, 515, 516, 517, 518, 519, 520, 521, 522, 523, 524, 525, 526, 527, 528, 529, 530, 531, 532, 533, 534, 551, 552, 553, 554, 555, 556, 557, 558, 559, 560, 561, 562, 563, 564, 565, 567, 568, 569, 570, 571, 572, 576, 583, 585 and/or a stop codon inserted or substituted at a position selected from 497 to 585.
   6. The polypeptide according to paragraph 5 wherein the reference is HSA (SEQ ID No: 2) or a fragment thereof, or a fusion polypeptide comprising HSA or a fragment thereof, most preferably SEQ ID NO: 2.
   7. The polypeptide according to paragraph 6 wherein the alteration is a substitution.
   8 The polypeptide according to paragraph 5, having a stronger binding affinity to FcRn and/or longer plasma half-life than a parent albumin, reference albumin, fragment thereof or fusion polypeptide comprising said parent albumin, reference albumin or fragment or fusion thereof.
   9. The polypeptide according to paragraph 5, having a weaker binding affinity to FcRn and/or shorter plasma half-life than a parent albumin, reference albumin, fragment thereof or fusion polypeptide comprising said parent albumin, reference albumin or fragment or fusion thereof.
   10. The polypeptide according to paragraph 5, comprising one or more further alterations that provides a conjugatable thiol group on the polypeptide.
   11. The polypeptide according to paragraph 5, wherein the sequence identity of the polypeptide to SEQ ID NO: 2 is more than 80%, preferably more than 90%, more preferred more than 95%, more preferred more than 96%, even more preferred more than 97%, more preferred more than 98% and most preferred more than 99%.
   12. The polypeptide according to paragraph 5, wherein the fragment is at least 20 amino acids, preferably at least 50 amino acids, preferably at least 100 amino acids, more preferred at least 200 amino acids, more preferred at least 300 amino acids, more preferred at least 400 amino acids and most preferred at least 500 amino acids.
   13. A fusion polypeptide comprising a polypeptide according to paragraph 5 and a fusion partner polypeptide selected from a therapeutic, prophylactic, diagnostic, imaging or other beneficial moiety.
   14. A conjugate comprising a polypeptide according to paragraph 5 and a conjugation partner.
   15. The conjugate according to paragraph 14 wherein the conjugation partner is a therapeutic, prophylactic, diagnostic, imaging or other beneficial moiety.
   16. An associate comprising a polypeptide according to paragraph 5 and a therapeutic, prophylactic, diagnostic, imaging or other beneficial moiety.
   17. A nanoparticle or microparticle comprising a polypeptide according to paragraph 5, a fusion polypeptide according to paragraph 13, a conjugate according to paragraph 14 or an associate according to paragraph 16.
   18. A composition comprising a polypeptide, fusion polypeptide, conjugate, associate or nanoparticle or microparticle according to paragraph 5, wherein the binding affinity of the polypeptide, fusion polypeptide, conjugate, associate or nanoparticle or microparticle to FcRn is stronger than the binding affinity of a composition comprising the corresponding parent albumin, reference albumin, fragment thereof or fusion polypeptide, conjugate, associate or nanoparticle or microparticle comprising said parent albumin, reference albumin or fragment or fusion thereof to FcRn.
   19. A composition according to paragraph 18 where the binding affinity of the polypeptide, fusion polypeptide, conjugate, associate or nanoparticle or microparticle to FcRn is stronger than the binding affinity of HSA to FcRn.
   20. A composition according to paragraph 18, wherein the binding coefficient of the variant of to the polypeptide, fusion polypeptide, conjugate, associate or nanoparticle or microparticle to FcRn is less than 0.9×KD of HSA to FcRn, more preferred less than 0.5×KD of HSA to FcRn, more preferred less than 0.1×KD of HSA to FcRn, even more preferred less than 0.05×KD of HSA to FcRn, even more preferred less than 0.02×KD of HSA to FcRn and most preferred less than 0.01×KD of HSA to FcRn.
   21. The composition according to paragraph 18, comprising a polypeptide or fusion polypeptide according to paragraph 5, a conjugate according to paragraph 14, an associate according to paragraph 16 or a nanoparticle or microparticle according to paragraph 17, further comprising a compound comprising an antibody binding domain (ABD) and a therapeutic, prophylactic, diagnostic, imaging or other beneficial moiety.
   22. The composition according to paragraph 18, comprising a pharmaceutically acceptable carrier.
   23. A method of using of a polypeptide or fusion polypeptide according to paragraph 5, a conjugate according to paragraph 14, an associate according to paragraph 16 or a nanoparticle or microparticle according to paragraph 17 or a composition according to paragraph 18 to alter the binding affinity to FcRn or half-life, preferably in plasma, of a therapeutic, prophylactic, diagnostic, imaging or other beneficial moiety.
   24. The method according to paragraph 23 wherein the binding affinity is to FcRn is increased relative to the binding affinity of a reference comprising or consisting of HSA (SEQ ID NO: 2) or a fragment, fusion, conjugate, associate, nanoparticle or microparticle thereof to FcRn.
   25. The method according to paragraph 23 wherein the binding affinity is to FcRn is decreased relative to the binding affinity of a reference comprising or consisting of HSA (SEQ ID NO: 2) or a fragment, fusion, conjugate, associate, nanoparticle or microparticle thereof to FcRn.
   26. A method for altering the binding affinity to FcRn or half-life preferably in plasma, of a molecule comprising:

[0444] (a) where the molecule is a polypeptide, fusing or conjugating the molecule to a polypeptide according to paragraph 5 or to a conjugate according to paragraph 14; associating the molecule to a polypeptide according to paragraph 5 or to a conjugate according to paragraph 13; incorporating the molecule in an associate according to paragraph 16, in nanoparticle or microparticle according to paragraph 17 or a composition according to paragraph 18;

[0445] (b) where the molecule is not a polypeptide, conjugating the molecule to a polypeptide according to paragraph 5 or to a conjugate according to paragraph 14; associating the molecule to a polypeptide according to paragraph 5 or to a conjugate according to paragraph 14; incorporating the molecule in an associate according to paragraph 16, in nanoparticle or microparticle according to paragraph 17 or a composition according to paragraph 18.

27. A method according to paragraph 26 wherein the molecule is a therapeutic, prophylactic, diagnostic, imaging or other beneficial moiety.
28. A polypeptide, fusion polypeptide, conjugate, associate, nanoparticle or microparticle or composition thereof according to paragraph 5 wherein the polypeptide, fusion polypeptide, conjugate, associate, nanoparticle or microparticle or composition comprises one or more moiety selected from those described herein.
29. A nucleic acid encoding the polypeptide or fusion polypeptide of paragraph 5.
30. A vector comprising a nucleic acid according to paragraph 29.
31. A host cell comprising a nucleic acid according to paragraph 29.
32. A host cell according to paragraph 31 wherein the host cell is a eukaryote, preferably a yeast (such as Saccharomyces cerevisiae) or a mammalian cell (such as CHO or HEK) or a plant cell (such as rice).
33. A method of prophylaxis, treatment or diagnosis comprising administering a polypeptide, fusion polypeptide, conjugate, composition, associate, nanoparticle or microparticle or polynucleotide according to paragraph 5 to a subject.
34. A method for preparing a polypeptide which is a variant albumin, fragment thereof, or fusion polypeptide comprising variant albumin or a fragment thereof having a binding affinity to FcRn which is altered compared to the binding affinity of a reference albumin, fragment or fusion thereof to FcRn, comprising the steps of:

[0446] (a) identifying one or more amino acid residue positions being important for the binding of albumin to FcRn, in an albumin or a fragment thereof or the albumin part of a fusion polypeptide comprising albumin or a fragment thereof by:
[0447] (i) providing a three dimensional structure (model) of an albumin, such as residues 1 to 585 of HSA (SEQ ID No. 2);
[0448] (ii) providing a three dimensional structure (model) of FcRn, the structure being solved at a pH equal to or lower than 6.3;
[0449] (iii) using the albumin structure of (i) and the FcRn structure of (ii) to model the structure of a complex formed by albumin bound to FcRn, thus generating a docking model;
[0450] (iv) using the docking model to identify amino acid residues in the albumin which interact with FcRn or affect interaction of albumin with FcRn;

[0451] (b) providing a nucleic acid encoding said polypeptide;

[0452] (c) modifying the nucleic acid provided in (b), so that at the one or more amino acid residue located at the positions identified in (a), there is an alteration;

[0453] (d) expressing the modified nucleic acid in a suitable host cell; and

[0454] (e) recovering the polypeptide.

35. The method according to paragraph 34 wherein the provided three dimensional structure (model) of FcRn is solved at a pH from 3.7 to 4.7.
36. The method according to paragraph 34, wherein the reference is HSA (SEQ ID No: 2) or a fragment thereof, or a fusion polypeptide comprising HSA or a fragment thereof, most preferably SEQ ID NO: 2.
37. The method according to paragraph 34, wherein the one or more alteration is a substitution.
38. The method of paragraph 34, wherein step (a) further comprises:
[0455] (v) comparing the primary structure and/or the tertiary structure of a second albumin (e.g. a non-human albumin) with the primary structure and/or the tertiary structure of the albumin of (i) to identify equivalent amino acids to those identified in (iv) and/or;
[0456] (vi) preparing the polypeptide comprising one or more alterations identified in (iv) or (v) and confirming (e.g. by binding affinity analysis) that the prepared polypeptide has an altered binding affinity to FcRn compared to the binding affinity of the albumin of (i) to FcRn.

### REFERENCES FROM EXAMPLES 1, 2 AND 3

[0457] 1. Peters T, Jr. (1985) Serum albumin. Adv Protein Chem 37:161-245.
[0458] 2. Chaudhury C, et al. (2003) The major histocompatibility complex-related Fc receptor for IgG (FcRn) binds albumin and prolongs its lifespan. J Exp Med 197(3):315-322.
[0459] 3. Anderson C L, et al. (2006) Perspective—FcRn transports albumin: relevance to immunology and medicine. Trends Immunol 27(7):343-348.
[0460] 4. Roopenian D C & Akilesh S (2007) FcRn: the neonatal Fc receptor comes of age. Nat Rev Immunol 7(9):715-725.
[0461] 5. Ward E S & Ober R J (2009) Chapter 4: Multitasking by exploitation of intracellular transport functions the many faces of FcRn. Adv Immunol 103:77-115.
[0462] 6. Burmeister W P, Huber A H, & Bjorkman P J (1994) Crystal structure of the complex of rat neonatal Fc receptor with Fc. Nature 372(6504):379-383.
[0463] 7. Burmeister W P, Gastinel L N, Simister N E, Blum M L, & Bjorkman P J (1994) Crystal structure at 2.2 Å resolution of the MHC-related neonatal Fc receptor. Nature 372(6504):336-343.
[0464] 8. West A P, Jr. & Bjorkman P J (2000) Crystal structure and immunoglobulin G binding properties of the human major histocompatibility complex-related Fc receptor. Biochemistry 39(32):9698-9708.
[0465] 9. Chaudhury C, Brooks C L, Carter D C, Robinson J M, & Anderson C L (2006) Albumin binding to FcRn: distinct from the FcRn-IgG interaction. Biochemistry 45(15):4983-4990.
[0466] 10. Ober R J, Martinez C, Lai X, Zhou J, & Ward E S (2004) Exocytosis of IgG as mediated by the receptor, FcRn: an analysis at the single-molecule level. Proc Natl Acad Sci USA 101(30):11076-11081.
[0467] 11. Ober R J, Martinez C, Vaccaro C, Zhou J, & Ward E S (2004) Visualizing the site and dynamics of IgG salvage by the MHC class I-related receptor, FcRn. J Immunol 172(4):2021-2029.
[0468] 12. Prabhat P, et al. (2007) Elucidation of intracellular recycling pathways leading to exocytosis of the Fc receptor, FcRn, by using multifocal plane microscopy. Proc Natl Acad Sci USA 104(14):5889-5894.
[0469] 13. Roopenian D C, et al. (2003) The MHC class I-like IgG receptor controls perinatal IgG transport, IgG homeostasis, and fate of IgG-Fc-coupled drugs. J Immunol 170(7):3528-3533.
[0470] 14. Montoyo H P, et al. (2009) Conditional deletion of the MHC class I-related receptor FcRn reveals the sites of IgG homeostasis in mice. Proc Natl Acad Sci USA 106(8):2788-2793.
[0471] 15. Wani M A, et al. (2006) Familial hypercatabolic hypoproteinemia caused by deficiency of the neonatal Fc receptor, FcRn, due to a mutant beta2-microglobulin gene. Proc Natl Acad Sci USA 103(13):5084-5089.
[0472] 16. Minchiotti L, Galliano M, Kragh-Hansen U, & Peters T, Jr. (2008) Mutations and polymorphisms of the gene of the major human blood protein, serum albumin. Hum Mutat 29(8):1007-1016.
[0473] 17. Andersen J T, Daba M B, & Sandlie I (2010) FcRn binding properties of an abnormal truncated analbuminemic albumin variant. Clin Biochem 43(4-5):367-372.
[0474] 18. Andersen J T & Sandlie I (2007) A receptor-mediated mechanism to support clinical observation of altered albumin variants. Clin Chem 53(12):2216.
[0475] 19. Sugio S, Kashima A, Mochizuki S, Noda M, & Kobayashi K (1999) Crystal structure of human serum albumin at 2.5 A resolution. Protein Eng 12(6):439-446.
[0476] 20. Peach R J & Brennan S O (1991) Structural characterization of a glycoprotein variant of human serum albumin: albumin Casebrook (494 Asp----Asn). Biochim Biophys Acta 1097(1):49-54.
[0477] 21. Andersen J T, Daba M B, Berntzen G, Michaelsen T E, & Sandlie I (2010) Cross-species binding analyses of mouse and human neonatal Fc receptor show dramatic differences in immunoglobulin G and albumin binding. J Biol Chem 285(7):4826-4836.
[0478] 22. Andersen J T, Dee Qian J, & Sandlie I (2006) The conserved histidine 166 residue of the human neonatal Fc receptor heavy chain is critical for the pH-dependent binding to albumin. Eur J Immunol 36(11):3044-3051.
[0479] 23. Mezo A R, Sridhar V, Badger J, Sakorafas P, & Nienaber V (2010) X-ray crystal structures of monomeric and dimeric peptide inhibitors in complex with the human neonatal Fc receptor, FcRn. J Biol Chem 285(36):27694-27701.
[0480] 24. Sheffield W P, Marques J A, Bhakta V, & Smith I J (2000) Modulation of clearance of recombinant serum albumin by either glycosylation or truncation. Thromb Res 99(6):613-621.
[0481] 25. Kenanova V E, et al. (2010) Tuning the serum persistence of human serum albumin domain III:diabody fusion proteins. Protein Eng Des Sel 23(10):789-798.
[0482] 26. Simard J R, et al. (2005) Locating high-affinity fatty acid-binding sites on albumin by x-ray crystallography and NMR spectroscopy. Proc Natl Acad Sci USA 102(50):17958-17963.
[0483] 27. Curry S, Mandelkow H, Brick P, & Franks N (1998) Crystal structure of human serum albumin complexed with fatty acid reveals an asymmetric distribution of binding sites. Nat Struct Biol 5(9):827-835.
[0484] 28. Kuo T T, et al. (2010) Neonatal Fc receptor: from immunity to therapeutics. J Clin Immunol 30(6):777-789.
[0485] 29. Andersen J T & Sandlie I (2009) The versatile MHC class I-related FcRn protects IgG and albumin from degradation: implications for development of new diagnostics and therapeutics. Drug Metab Pharmacokinet 24(4):318-332.
[0486] 30. Werle M & Bernkop-Schnurch A (2006) Strategies to improve plasma half life time of peptide and protein drugs. Amino Acids 30(4):351-367.
[0487] 31. McGregor D P (2008) Discovering and improving novel peptide therapeutics. Curr Opin Pharmacol 8(5):616-619.
[0488] 32. Zalevsky J, et al. (2010) Enhanced antibody half-life improves in vivo activity. Nat Biotechnol 28(2):157-159.
[0489] 33. Stehle G, et al. (1997) Plasma protein (albumin) catabolism by the tumor itself—implications for tumor metabolism and the genesis of cachexia. Crit Rev Oncol Hematol 26(2):77-100.
[0490] 34. Kenanova V, et al. (2005) Tailoring the pharmacokinetics and positron emission tomography imaging properties of anti-carcinoembryonic antigen single-chain Fv-Fc antibody fragments. Cancer Res 65(2):622-631.
[0491] 35. Kenanova V, et al. (2007) Radioiodinated versus radiometal-labeled anti-carcinoembryonic antigen single-chain Fv-Fc antibody fragments: optimal pharmacokinetics for therapy. Cancer Res 67(2):718-726.
[0492] 36. Andersen J T, et al. (2008) Ligand binding and antigenic properties of a human neonatal Fc receptor with mutation of two unpaired cysteine residues. FEBS J 275(16):4097-4110.
[0493] 37. Chen R, Li L, & Weng Z (2003) ZDOCK: an initial-stage protein-docking algorithm. Proteins 52(1):80-87.

1. (canceled)

2. A method of altering the binding activity of a polypeptide, which is a variant of albumin, a fragment thereof or a fusion polypeptide comprising said variant albumin or fragment thereof, to FcRn as compared with the FcRn binding activity of a parent albumin, reference albumin, fragment thereof or a fusion polypeptide comprising said parent albumin, reference albumin or fragment or fusion thereof, comprising contacting FcRn with said polypeptide, wherein said polypeptide further comprises a substitution to D, E or G at a position corresponding to 111 in SEQ ID NO: 2, wherein said polypeptide has a stronger binding affinity to FcRn or longer plasma half-life than a parent albumin, reference albumin, fragment thereof or fusion polypeptide comprising said parent albumin, reference albumin or fragment or fusion thereof.

3. The method of claim 2, wherein the substitution at the position corresponding to 111 in SEQ ID NO: 2 is to D.

4. The method of claim 2, wherein the substitution at the position corresponding to 111 in SEQ ID NO: 2 is to E.

5. The method of claim 2, wherein the substitution at the position corresponding to 111 in SEQ ID NO: 2 is to G.

6. The method of claim 2, wherein the reference albumin is HSA (SEQ ID NO: 2) or a fragment thereof, or a fusion polypeptide comprising HSA or a fragment thereof.

7. The method of claim 2, wherein the sequence identity of said polypeptide to SEQ ID NO: 2 is more than 80%, more than 90%, more than 95%, more than 96%, more than 97%, more than 98% or more than 99%.

8. The method of claim 2, wherein said fusion comprises a fusion partner polypeptide selected from a therapeutic, prophylactic, diagnostic, imaging or other beneficial moiety.

9. The method of claim 2, wherein said polypeptide further comprises a non-albumin moiety covalently attached to said polypeptide.

10. The method of claim 2, wherein said polypeptide further comprises a non-albumin moiety noncovalently associated with said polypeptide.

11. A method for altering the circulating half-life of a molecule comprising:
providing a variant of albumin, a fragment thereof or a fusion polypeptide comprising said variant albumin or fragment thereof; and
a) where the molecule is a polypeptide, fusing or conjugating the molecule to said variant of albumin, fragment thereof or fusion polypeptide comprising said variant albumin or fragment thereof; or
b) where the molecule is not a polypeptide, conjugating the molecule to said variant of albumin, fragment thereof or fusion polypeptide comprising said variant albumin or fragment thereof; or
c) contacting the molecule with said variant of albumin, fragment thereof or fusion polypeptide comprising said variant albumin or fragment thereof, wherein said contacting results in a noncovalent association between said molecule and variant of albumin, fragment thereof or fusion polypeptide comprising said variant albumin or fragment thereof;
wherein said variant of albumin, fragment thereof or fusion polypeptide comprising said variant albumin or fragment thereof comprises a substitution to D, E or G at a position corresponding to 111 in SEQ ID NO: 2, wherein said polypeptide has a stronger binding affinity to FcRn or longer plasma half-life than a parent albumin, reference albumin, fragment thereof or fusion polypeptide comprising said parent albumin, reference albumin or fragment or fusion thereof.

12. The method of claim 11, wherein the substitution at the position corresponding to 111 in SEQ ID NO: 2 is to D.

13. The method of claim 11, wherein the substitution at the position corresponding to 111 in SEQ ID NO: 2 is to E.

14. The method of claim 11, wherein the substitution at the position corresponding to 111 in SEQ ID NO: 2 is to G.

15. The method of claim 11, wherein the reference albumin is HSA (SEQ ID NO: 2) or a fragment thereof, or a fusion polypeptide comprising HSA or a fragment thereof.

16. The method of claim 11, wherein the sequence identity of said polypeptide to SEQ ID NO: 2 is more than 80%, more than 90%, more than 95%, more than 96%, more than 97%, more than 98% or more than 99%.

17. The method of claim 11, wherein said fusion comprises a fusion partner polypeptide selected from a therapeutic, prophylactic, diagnostic, imaging or other beneficial moiety.

18. The method of claim 11, wherein said polypeptide further comprises a non-albumin moiety covalently attached to said polypeptide.

19. The method of claim 11, wherein said polypeptide further comprises a non-albumin moiety noncovalently associated with said polypeptide.

The application's sequence listing, which the Patent Office published only in electronic form, follows.

SEQUENCE LISTING (184 sequences)

SEQ ID NO: 1 - DNA, 1758 bp, Homo sapiens
  misc_feature (1)..(1758): cDNA encoding HSA
gatgcacacaagagtgaggttgctcatcggtttaaagatttgggagaagaaaatttcaaagccttggtgttgattgcctttgctcagtatcttcagcagtgtccatttgaagatcatgtaaaattagtgaatgaagtaactgaatttgcaaaaacatgtgttgctgatgagtcagctgaaaattgtgacaaatcacttcataccctttttggagacaaattatgcacagttgcaactcttcgtgaaacctatggtgaaatggctgactgctgtgcaaaacaagaacctgagagaaatgaatgcttcttgcaacacaaagatgacaacccaaacctcccccgattggtgagaccagaggttgatgtgatgtgcactgcttttcatgacaatgaagagacatttttgaaaaaatacttatatgaaattgccagaagacatccttacttttatgccccggaactccttttctttgctaaaaggtataaagctgcttttacagaatgttgccaagctgctgataaagctgcctgcctgttgccaaagctcgatgaacttcgggatgaagggaaggcttcgtctgccaaacagagactcaagtgtgccagtctccaaaaatttggagaaagagctttcaaagcatgggcagtagctcgcctgagccagagatttcccaaagctgagtttgcagaagtttccaagttagtgacagatcttaccaaagtccacacggaatgctgccatggagatctgcttgaatgtgctgatgacagggcggaccttgccaagtatatctgtgaaaatcaagattcgatctccagtaaactgaaggaatgctgtgaaaaacctctgttggaaaaatcccactgcattgccgaagtggaaaatgatgagatgcctgctgacttgccttcattagctgctgattttgttgaaagtaaggatgtttgcaaaaactatgctgaggcaaaggatgtcttcctgggcatgtttttgtatgaatatgcaagaaggcatcctgattactctgtcgtgctgctgctgagacttgccaagacatatgaaaccactctagagaagtgctgtgccgctgcagatcctcatgaatgctatgccaaagtgttcgatgaatttaaacctcttgtggaagagcctcagaatttaatcaaacaaaattgtgagctttttgagcagcttggagagtacaaattccagaatgcgctattagttcgttacaccaagaaagtaccccaagtgtcaactccaactcttgtagaggtctcaagaaacctaggaaaagtgggcagcaaatgttgtaaacatcctgaagcaaaaagaatgccctgtgcagaagactatctatccgtggtcctgaaccagttatgtgtgttgcatgagaaaacgccagtaagtgacagagtcaccaaatgctgcacagaatccttggtgaacaggcgaccatgcttttcagctctggaagtcgatgaaacatacgttcccaaagagtttaatgctgaaacattcaccttccatgcagatatatgcacactttctgagaaggagagacaaatcaagaaacaaactgcacttgttgagctcgtgaaacacaagcccaaggcaacaaaagagcaactgaaagctgttatggatgatttcgcagcttttgtagagaagtgctgcaaggctgacgataaggagacctgctttgccgaggagggtaaaaaacttgttgctgcaagtcaagctgccttaggcttataa

SEQ ID NO: 2 - protein, 585 aa, Homo sapiens [sequence omitted]

SEQ ID NO: 3 - protein, 585 aa, Artificial Sequence
  HSA K573P
DAHKSEVAHRFKDLGEENFKALVLIAFAQYLQQCPFEDHVKLVNEVTEFAKTCVADESAENCDKSLHTLFGDKLCTVATLRETYGEMADCCAKQEPERNECFLQHKDDNPNLPRLVRPEVDVMCTAFHDNEETFLKKYLYEIARRHPYFYAPELLFFAKRYKAAFTECCQAADKAACLLPKLDELRDEGKASSAKQRLKCASLQKFGERAFKAWAVARLSQRFPKAEFAEVSKLVTDLTKVHTECCHGDLLECADDRADLAKYICENQDSISSKLKECCEKPLLEKSHCIAEVENDEMPADLPSLAADFVESKDVCKNYAEAKDVFLGMFLYEYARRHPDYSVVLLLRLAKTYETTLEKCCAAADPHECYAKVFDEFKPLVEEPQNLIKQNCELFEQLGEYKFQNALLVRYTKKVPQVSTPTLVEVSRNLGKVGSKCCKHPEAKRMPCAEDYLSVVLNQLCVLHEKTPVSDRVTKCCTESLVNRRPCFSALEVDETYVPKEFNAETFTFHADICTLSEKERQIKKQTALVELVKHKPKATKEQLKAVMDDFAAFVEKCCKADDKETCFAEEGPKLVAASQAALGL

SEQ ID NO: 4 - protein, 608 aa, Homo sapiens
MKWVTFISLLFLFSSAYSRGVFRRDAHKSEVAHRFKDLGEENFKALVLIAFAQYLQQCPFEDHVKLVNEVTEFAKTCVADESAENCDKSLHTLFGDKLCTVATLRETYGEMADCCAKQEPERNECFLQHKDDNPNLPRLVRPEVDVMCTAFHDNEETFLKKYLYEIARRHPYFYAPELLFFAKRYKAAFTECCQAADKAACLLPKLDELRDEGKASSAKQRLKCASLQKFGERAFKAWAVARLSQRFPKAEFAEVSKLVTDLTKVHTECCHGDLLECADDRADLAKYICENQDSISSKLKECCEKPLLEKSHCIAEVENDEMPADLPSLAADFVESKDVCKNYAEAKDVFLGMFLYEYARRHPDYSVVLLLRLAKTYETTLEKCCAAADPHECYAKVFDEFKPLVEEPQNLIKQNCELFEQLGEYKFQNALLVRYTKKVPQVSTPTLVEVSRNLGKVGSKCCKHPEAKRMPCAEDYLSVVLNQLCVLHEKTPVSDRVTKCCTESLVNRRPCFSALEVDETYVPKEFNAETFTFHADICTLSEKERQIKKQTALVELVKHKPKATKEQLKAVMDDFAAFVEKCCKADDKETCFAEEGKKLVAASQAALG

SEQ ID NO: 5 - protein, 621 aa, Pan troglodytes
MNESSCCSTSLPAFGVSVLDSGHSSSSAYSRGVFRRDAHKSEVAHRFKDLGEENFKALVLVAFAQYLQQCPFEDHVKLVNEVTEFAKTCVADESAENCDKSLHTLFGDKLCTVATLREKYGEMADCCAKQEPERNECFLQHKDDNPNLPRLVRPEVDVMCTAFHDNEGTFLKKYLYEVARRHPYFYAPELLFFAERYKAAFTECCQAADKAACLLPKLDELRDEGKASSAKQRLKCASLQKFGERAFKAWAVARLSQRFPKAEFAEVSKLVTDLTKVHTECCHGDLLECADDRADLAKYICENQDSISSKLKECCEKPLLEKSHCLAEVENDEMPADLPSLAADFVESKEVCKNYAEAKDVFLGMFLYEYARRHPDYSVVLLLRLAKTYETTLEKCCAAADPHECYAKVFDEFKPLVEEPQNLIKQNCELFEQLGEYKFQNALLVRYTKKVPQVSTPTLVEVSRNLGKVGSKCCKHPEAKRMPCAEDYLSVVLNQLCVLHEKTPVSDRVTKCCTESLVNRRPCFSALEVDETYVPKEFNAETFTFHADICTLSEKERQIKKQTALVELVKHKPKATKEQLKAVMDDFAAFVEKCCKADDKETCFAEEGKKLVAASQAALGL

SEQ ID NO: 6 - protein, 608 aa, Macaca mulatta
MKWVTFISLLFLFSSAYSRGVFRRDTHKSEVAHRFKDLGEEHFKGLVLVAFSQYLQQCPFEEHVKLVNEVTEFAKTCVADESAENCDKSLHTLFGDKLCTVATLRETYGEMADCCAKQEPERNECFLQHKDDNPNLPPLVRPEVDVMCTAFHDNEATFLKKYLYEVARRHPYFYAPELLFFAARYKAAFAECCQAADKAACLLPKLDELRDEGKASSAKQRLKCASLQKFGDRAFKAWAVARLSQKFPKAEFAEVSKLVTDLTKVHTECCHGDLLECADDRADLAKYMCENQDSISSKLKECCDKPLLEKSHCLAEVENDEMPADLPSLAADYVESKDVCKNYAEAKDVFLGMFLYEYARRHPDYSVMLLLRLAKAYEATLEKCCAAADPHECYAKVFDEFQPLVEEPQNLVKQNCELFEQLGEYKFQNALLVRYTKKVPQVSTPTLVEVSRNLGKVGAKCCKLPEAKRMPCAEDYLSVVLNRLCVLHEKTPVSEKVTKCCTESLVNRRPCFSALELDEAYVPKAFNAETFTFHADMCTLSEKEKQVKKQTALVELVKHKPKATKEQLKGVMDNFAAFVEKCCKADDKEACFAEEGPKFVAASQAALA

SEQ ID NO: 7 - protein, 608 aa, Mesocricetus auratus
MKWVTFLLLLFVSDSAFSRGLFRRDAHKSEIAHRFKDLGEQHFKGLVLIAFSQFLQKCPYEEHVKLVNEVTDFAKTCVADESAENCDKSLHTLFGDKLCAIPTLRDSYGELADCCAKKEPERNECFLKHKDDHPNLPPFVRPDAEAMCTSFQENAVTFMGHYLHEVARRHPYFYAPELLYYAEKYSAIMTECCGEADKAACITPKLDALKEKALASSVNQRLKCSSLQRFGQRAFKAWAVARMSQKFPKADFAEITKLATDLTKLTEECCHGDLLECADDRAELAKYMCENQASISSKLQACCDKPVLKKSHCLSEVENDDLPADLPSLAADFVEDKEVCKNYAEAKDVFLGTFLYEYARRHPDYSVALLLRLAKKYEATLEKCCAEADPSACYGKVLDEFQPLVEEPKNLVKANCELFEKLGEYGFQNALIVRYTQKAPQVSTPTLVEAARNLGKVGSKCCVLPEAQRLPCVEDYISAILNRVCVLHEKTPVSEQVTKCCTGSVVERRPCFSALPVDETYVPKEFKAETFTFHADICSLPEKEKQMKKQAALVELVKHKPKATGPQLRTVLGEFTAFLDKCCKAEDKEACFSEDGPKLVASSQAALA

SEQ ID NO: 8 - protein, 608 aa, Cavia porcellus
MKWVTFISLLFLFSSVYSRGVFRREAHKSEIAHRFNDLGEGHFKGLVLITLSQHLQKSPFEEHVKLVNEVTDFAKACVADESAQNCGKAIATLFGDKVCAIPSLRETYGELADCCAKEDPDRVECFLQHKDDNPNLPPFERPEPEALCTAFKENNDRFIGHYLYEVSRRHPYFYAPELLYYAEKYKNALTECCEAADKAACLTPKLDAIKEKALVSSAQQRLKCASLQKFGERAFKAWSVARLSQKFPKAEFAEISTIVTSLTKVTKECCHGDLLECADDRQELAKYMCEHQDSISSKLKECCVKPTLQKAHCILEIQRDELPTELPDLAVDFVEDKEVCKNFAEAKDVFLGTFLYEYSRRHPEYSIGMLLRIAKGYEAKLEKCCAEADPHACYAKVFDELQPLIDEPKKLVQQNCELFDKLGEYGFQNALAVRYTQKAPQVSTPTLVEYARKLGSVGTKCCSLPETERLSCTENYLALILNRLCILHEKTPVSERVTKCCTESLVNRRPCFSALHVDETYVPKPFHADSFTFHADICTLPEKEKQVKKQMALVELVKHKPKASEEQMKTVMGDFAAFLKKCCDADNKEACFTEDGPKLVAKCQATLA

SEQ ID NO: 9 - protein, 608 aa, Mus musculus
MKWVTFLLLLFVSGSAFSRGVFRREAHKSEIAHRYNDLGEQHFKGLVLIAFSQYLQKCSYDEHAKLVQEVTDFAKTCVADESAANCDKSLHTLFGDKLCAIPNLRENYGELADCCTKQEPERNECFLQHKDDNPSLPPFERPEAEAMCTSFKENPTTFMGHYLHEVARRHPYFYAPELLYYAEQYNEILTQCCAEADKESCLTPKLDGVKEKALVSSVRQRMKCSSMQKFGERAFKAWAVARLSQTFPNADFAEITKLATDLTKVNKECCHGDLLECADDRAELAKYMCENQATISSKLQTCCDKPLLKKAHCLSEVEHDTMPADLPAIAADFVEDQEVCKNYAEAKDVFLGTFLYEYSRRHPDYSVSLLLRLAKKYEATLEKCCAEANPPACYGTVLAEFQPLVEEPKNLVKTNCDLYEKLGEYGFQNAILVRYTQKAPQVSTPTLVEAARNLGRVGTKCCTLPEDQRLPCVEDYLSAILNRVCLLHEKTPVSEHVTKCCSGSLVERRPCFSALTVDETYVPKEFKAETFTFHSDICTLPEKEKQIKKQTALAELVKHKPKATAEQLKTVMDDFAQFLDTCCKAADKDTCFSTEGPNLVTRCKDALA

SEQ ID NO: 10 - protein, 608 aa, Rattus norvegicus
MKWVTFLLLLFISGSAFSRGVFRREAHKSEIAHRFKDLGEQHFKGLVLIAFSQYLQKCPYEEHIKLVQEVTDFAKTCVADENAENCDKSIHTLFGDKLCAIPKLRDNYGELADCCAKQEPERNECFLQHKDDNPNLPPFQRPEAEAMCTSFQENPTSFLGHYLHEVARRHPYFYAPELLYYAEKYNEVLTQCCTESDKAACLTPKLDAVKEKALVAAVRQRMKCSSMQRFGERAFKAWAVARMSQRFPNAEFAEITKLATDVTKINKECCHGDLLECADDRAELAKYMCENQATISSKLQACCDKPVLQKSQCLAEIEHDNIPADLPSIAADFVEDKEVCKNYAEAKDVFLGTFLYEYSRRHPDYSVSLLLRLAKKYEATLEKCCAEGDPPACYGTVLAEFQPLVEEPKNLVKTNCELYEKLGEYGFQNAVLVRYTQKAPQVSTPTLVEAARNLGRVGTKCCTLPEAQRLPCVEDYLSAILNRLCVLHEKTPVSEKVTKCCSGSLVERRPCFSALTVDETYVPKEFKAETFTFHSDICTLPDKEKQIKKQTALAELVKHKPKATEDQLKTVMGDFAQFVDKCCKAADKDNCFATEGPNLVARSKEALA

SEQ ID NO: 11 - protein, 607 aa, Bos taurus
MKWVTFISLLLLFSSAYSRGVFRRDTHKSEIAHRFKDLGEEHFKGLVLIAFSQYLQQCPFDEHVKLVNELTEFAKTCVADESHAGCEKSLHTLFGDELCKVASLRETYGDMADCCEKQEPERNECFLSHKDDSPDLPKLKPDPNTLCDEFKADEKKFWGKYLYEIARRHPYFYAPELLYYANKYNGVFQECCQAEDKGACLLPKIETMREKVLASSARQRLRCASIQKFGERALKAWSVARLSQKFPKAEFVEVTKLVTDLTKVHKECCHGDLLECADDRADLAKYICDNQDTISSKLKECCDKPLLEKSHCIAEVEKDAIPENLPPLTADFAEDKDVCKNYQEAKDAFLGSFLYEYSRRHPEYAVSVLLRLAKEYEATLEECCAKDDPHACYSTVFDKLKHLVDEPQNLIKQNCDQFEKLGEYGFQNALIVRYTRKVPQVSTPTLVEVSRSLGKVGTRCCTKPESERMPCTEDYLSLILNRLCVLHEKTPVSEKVTKCCTESLVNRRPCFSALTPDETYVPKAFDEKLFTFHADICTLPDTEKQIKKQTALVELLKHKPKATEEQLKTVMENFVAFVDKCCAADDKEACFAVEGPKLVVSTQTALA

SEQ ID NO: 12 - protein, 607 aa, Equus caballus
MKWVTFVSLLFLFSSAYSRGVLRRDTHKSEIAHRFNDLGEKHFKGLVLVAFSQYLQQCPFEDHVKLVNEVTEFAKKCAADESAENCDKSLHTLFGDKLCTVATLRATYGELADCCEKQEPERNECFLTHKDDHPNLPKLKPEPDAQCAAFQEDPDKFLGKYLYEVARRHPYFYGPELLFHAEEYKADFTECCPADDKLACLIPKLDALKERILLSSAKERLKCSSFQNFGERAVKAWSVARLSQKFPKADFAEVSKIVTDLTKVHKECCHGDLLECADDRADLAKYICEHQDSISGKLKACCDKPLLQKSHCIAEVKEDDLPSDLPALAADFAEDKEICKHYKDAKDVFLGTFLYEYSRRHPDYSVSLLLRIAKTYEATLEKCCAEADPPACYRTVFDQFTPLVEEPKSLVKKNCDLFEEVGEYDFQNALIVRYTKKAPQVSTPTLVEIGRTLGKVGSRCCKLPESERLPCSENHLALALNRLCVLHEKTPVSEKITKCCTDSLAERRPCFSALELDEGYVPKEFKAETFTFHADICTLPEDEKQIKKQSALAELVKHKPKATKEQLKTVLGNFSAFVAKCCGREDKEACFAEEGPKLVASSQLALA

SEQ ID NO: 13 - protein, 607 aa, Equus asinus
MKWVTFVSLLFLFSSAYFRGVLRRDTHKSEIAHRFNDLGEKHFKGLVLVAFSQYLQQCPFEDHVKLVNEVTEFAKKCAADESAENCDKSLHTLFGDKLCTVATLRATYGELADCCEKQEPERNECFLTHKDDHPNLPKLKPEPDAQCAAFQEDPDKFLGKYLYEVARRHPYFYGPELLFHAEEYKADFTECCPADDKAGCLIPKLDALKERILLSSAKERLKCSSFQKFGERAFKAWSVARLSQKFPKADFAEVSKIVTDLTKVHKECCHGDLLECADDRADLTKYICEHQDSISGKLKACCDKPLLQKSHCIAEVKEDDLPSDLPALAADFAEDKEICKHYKDAKDVFLGTFLYEYSRRHPDYSVSLLLRIAKTYEATLEKCCAEADPPACYATVFDQFTPLVEEPKSLVKKNCDLFEEVGEYDFQNALIVRYTKKAPQVSTPTLVEIGRTLGKVGSRCCKLPESERLPCSENHLALALNRLCVLHEKTPVSEKITKCCTDSLAERRPCFSALELDEGYIPKEFKAETFTFHADICTLPEDEKQIKKQSALAELVKHKPKATKEQLKTVLGNFSAFVAKCCGAEDKEACFAEEGPKLVASSQLALA

SEQ ID NO: 14 - protein, 608 aa, Oryctolagus cuniculus
MKWVTFISLLFLFSSAYSRGVFRREAHKSEIAHRFNDVGEEHFIGLVLITFSQYLQKCPYEEHAKLVKEVTDLAKACVADESAANCDKSLHDIFGDKICALPSLRDTYGDVADCCEKKEPERNECFLHHKDDKPDLPPFARPEADVLCKAFHDDEKAFFGHYLYEVARRHPYFYAPELLYYAQKYKAILTECCEAADKGACLTPKLDALEGKSLISAAQERLRCASIQKFGDRAYKAWALVRLSQRFPKADFTDISKIVTDLTKVHKECCHGDLLECADDRADLAKYMCEHQETISSHLKECCDKPILEKAHCIYGLHNDETPAGLPAVAEEFVEDKDVCKNYEEAKDLFLGKFLYEYSRRHPDYSVVLLLRLGKAYEATLKKCCATDDPHACYAKVLDEFQPLVDEPKNLVKQNCELYEQLGDYNFQNALLVRYTKKVPQVSTPTLVEISRSLGKVGSKCCKHPEAERLPCVEDYLSVVLNRLCVLHEKTPVSEKVTKCCSESLVDRRPCFSALGPDETYVPKEFNAETFTFHADICTLPETERKIKKQTALVELVKHKPHATNDQLKTVVGEFTALLDKCCSAEDKEACFAVEGPKLVESSKATLG

SEQ ID NO: 15 - protein, 583 aa, Capra hircus
DTHKSEIAHRFNDLGEENFQGLVLIAFSQYLQQCPFDEHVKLVKELTEFAKTCVADESHAGCDKSLHTLFGDELCKVATLRETYGDMADCCEKQEPERNECFLKHKDDSPDLPKLKPEPDTLCAEFKADEKKFWGKYLYEVARRHPYFYAPELLYYANKYNGVFQECCQAEDKGACLLPKIETMREKVLASSARQRLRCASIQKFGERALKAWSVARLSQKFPKADFTDVTKIVTDLTKVHKECCHGDLLECADDRADLAKYICDHQDTLSSKLKECCDKPVLEKSHCIAEIDKDAVPENLPPLTADFAEDKEVCKNYQEAKDVFLGSFLYEYSRRHPEYAVSVLLRLAKEYEATLEDCCAKEDPHACYATVFDKLKHLVDEPQNLIKKNCELFEKHGEYGFQNALIVRYTRKAPQVSTPTLVEISRSLGKVGTKCCAKPESERMPCTEDYLSLILNRLCVLHEKTPVSEKVTKCCTESLVNRRPCFSDLTLDETYVPKPFDGESFTFHADICTLPDTEKQIKKQTALVELLKHKPKATDEQLKTVMENFVAFVDKCCAADDKEGCFLLEGPKLVASTQAALA

SEQ ID NO: 16 - protein, 607 aa, Ovis aries
MKWVTFISLLLLFSSAYSRGVFRRDTHKSEIAHRFNDLGEENFQGLVLIAFSQYLQQCPFDEHVKLVKELTEFAKTCVADESHAGCDKSLHTLFGDELCKVATLRETYGDMADCCEKQEPERNECFLNHKDDSPDLPKLKPEPDTLCAEFKADEKKFWGKYLYEVARRHPYFYAPELLYYANKYNGVFQECCQAEDKGACLLPKIDAMREKVLASSARQRLRCASIQKFGERALKAWSVARLSQKFPKADFTDVTKIVTDLTKVHKECCHGDLLECADDRADLAKYICDHQDALSSKLKECCDKPVLEKSHCIAEVDKDAVPENLPPLTADFAEDKEVCKNYQEAKDVFLGSFLYEYSRRHPEYAVSVLLRLAKEYEATLEDCCAKEDPHACYATVFDKLKHLVDEPQNLIKKNCELFEKHGEYGFQNALIVRYTRKAPQVSTPTLVEISRSLGKVGTKCCAKPESERMPCTEDYLSLILNRLCVLHEKTPVSEKVTKCCTESLVNRRPCFSDLTLDETYVPKPFDEKFFTFHADICTLPDTEKQIKKQTALVELLKHKPKATDEQLKTVMENFVAFVDKCCAADDKEGCFVLEGPKLVASTQAALA

SEQ ID NO: 17 - protein, 608 aa, canis lupus familiaris
MKWVTFISLFFLFSSAYSRGLVRREAYKSEIAHRYNDLGEEHFRGLVLVAFSQYLQQCPFEDHVKLAKEVTEFAKACAAEESGANCDKSLHTLFGDKLCTVASLRDKYGDMADCCEKQEPDRNECFLAHKDDNPGFPPLVAPEPDALCAAFQDNEQLFLGKYLYEIARRHPYFYAPELLYYAQQYKGVFAECCQAADKAACLGPKIEALREKVLLSSAKERFKCASLQKFGDRAFKAWSVARLSQRFPKADFAEISKVVTDLTKVHKECCHGDLLECADDRADLAKYMCENQDSISTKLKECCDKPVLEKSQCLAEVERDELPGDLPSLAADFVEDKEVCKNYQEAKDVFLGTFLYEYARRHPEYSVSLLLRLAKEYEATLEKCCATDDPPTCYAKVLDEFKPLVDEPQNLVKTNCELFEKLGEYGFQNALLVRYTKKAPQVSTPTLVEVSRKLGKVGTKCCKKPESERMSCAEDFLSVVLNRLCVLHEKTPVSERVTKCCSESLVNRRPCFSGLEVDETYVPKEFNAETFTFHADLCTLPEAEKQVKKQTALVELLKHKPKATDEQLKTVMGDFGAFVEKCCAAENKEGCFSEEGPKLVAAAQAALV

SEQ ID NO: 18 - protein, 615 aa, Gallus gallus
MKWVTLISFIFLFSSATSRNLQRFARDAEHKSEIAHRYNDLKEETFKAVAMITFAQYLQRCSYEGLSKLVKDVVDLAQKCVANEDAPECSKPLPSIILDEICQVEKLRDSYGAMADCCSKADPERNECFLSFKVSQPDFVQPYQRPASDVICQEYQDNRVSFLGHFIYSVARRHPFLYAPAILSFAVDFEHALQSCCKESDVGACLDTKEIVMREKAKGVSVKQQYFCGILKQFGDRVFQARQLIYLSQKYPKAPFSEVSKFVHDSIGVHKECCEGDMVECMDDMARMMSNLCSQQDVFSGKIKDCCEKPIVERSQCIMEAEFDEKPADLPSLVEKYIEDKEVCKSFEAGHDAFMAEFVYEYSRRHPEFSIQLIMRIAKGYESLLEKCCKTDNPAECYANAQEQLNQHIKETQDVVKTNCDLLHDHGEADFLKSILIRYTKKMPQVPTDLLLETGKKMTTIGTKCCQLGEDRRMACSEGYLSIVIHDTCRKQETTPINDNVSQCCSQLYANRRPCFTAMGVDTKYVPPPFNPDMFSFDEKLCSAPAEEREVGQMKLLINLIKRKPQMTEEQIKTIADGFTAMVDKCCKQSDINTCFGEEGANLIVQSRATLGIGA

SEQ ID NO: 19 - protein, 607 aa, Sus scrofa
MKWVTFISLLFLFSSAYSRGVFRRDTYKSEIAHRFKDLGEQYFKGLVLIAFSQHLQQCPYEEHVKLVREVTEFAKTCVADESAENCDKSIHTLFGDKLCAIPSLREHYGDLADCCEKEEPERNECFLQHKNDNPDIPKLKPDPVALCADFQEDEQKFWGKYLYEIARRHPYFYAPELLYYAIIYKDVFSECCQAADKAACLLPKIEHLREKVLTSAAKQRLKCASIQKFGERAFKAWSLARLSQRFPKADFTEISKIVTDLAKVHKECCHGDLLECADDRADLAKYICENQDTISTKLKECCDKPLLEKSHCIAEAKRDELPADLNPLEHDFVEDKEVCKNYKEAKHVFLGTFLYEYSRRHPDYSVSLLLRIAKIYEATLEDCCAKEDPPACYATVFDKFQPLVDEPKNLIKQNCELFEKLGEYGFQNALIVRYTKKVPQVSTPTLVEVARKLGLVGSRCCKRPEEERLSCAEDYLSLVLNRLCVLHEKTPVSEKVTKCCTESLVNRRPCFSALTPDETYKPKEFVEGTFTFHADLCTLPEDEKQIKKQTALVELLKHKPHATEEQLRTVLGNFAAFVQKCCAAPDHEACFAVEGPKFVIEIRGILA

SEQ ID NO: 20 - protein, 584 aa, Artificial Sequence
  N terminal is residues 1 to 572 of HSA. C terminal is residues 573 to 584 of Macaque albumin.
DAHKSEVAHRFKDLGEENFKALVLIAFAQYLQQCPFEDHVKLVNEVTEFAKTCVADESAENCDKSLHTLFGDKLCTVATLRETYGEMADCCAKQEPERNECFLQHKDDNPNLPRLVRPEVDVMCTAFHDNEETFLKKYLYEIARRHPYFYAPELLFFAKRYKAAFTECCQAADKAACLLPKLDELRDEGKASSAKQRLKCASLQKFGERAFKAWAVARLSQRFPKAEFAEVSKLVTDLTKVHTECCHGDLLECADDRADLAKYICENQDSISSKLKECCEKPLLEKSHCIAEVENDEMPADLPSLAADFVESKDVCKNYAEAKDVFLGMFLYEYARRHPDYSVVLLLRLAKTYETTLEKCCAAADPHECYAKVFDEFKPLVEEPQNLIKQNCELFEQLGEYKFQNALLVRYTKKVPQVSTPTLVEVSRNLGKVGSKCCKHPEAKRMPCAEDYLSVVLNQLCVLHEKTPVSDRVTKCCTESLVNRRPCFSALEVDETYVPKEFNAETFTFHADICTLSEKERQIKKQTALVELVKHKPKATKEQLKAVMDDFAAFVEKCCKADDKETCFAEEGPKFVAASQAALA

SEQ ID NO: 21 - protein, 584 aa, Artificial Sequence
  N terminal is residues 1 to 572 from HSA. C terminal is residues 573 to 584 from mouse albumin.
DAHKSEVAHRFKDLGEENFKALVLIAFAQYLQQCPFEDHVKLVNEVTEFAKTCVADESAENCDKSLHTLFGDKLCTVATLRETYGEMADCCAKQEPERNECFLQHKDDNPNLPRLVRPEVDVMCTAFHDNEETFLKKYLYEIARRHPYFYAPELLFFAKRYKAAFTECCQAADKAACLLPKLDELRDEGKASSAKQRLKCASLQKFGERAFKAWAVARLSQRFPKAEFAEVSKLVTDLTKVHTECCHGDLLECADDRADLAKYICENQDSISSKLKECCEKPLLEKSHCIAEVENDEMPADLPSLAADFVESKDVCKNYAEAKDVFLGMFLYEYARRHPDYSVVLLLRLAKTYETTLEKCCAAADPHECYAKVFDEFKPLVEEPQNLIKQNCELFEQLGEYKFQNALLVRYTKKVPQVSTPTLVEVSRNLGKVGSKCCKHPEAKRMPCAEDYLSVVLNQLCVLHEKTPVSDRVTKCCTESLVNRRPCFSALEVDETYVPKEFNAETFTFHADICTLSEKERQIKKQTALVELVKHKPKATKEQLKAVMDDFAAFVEKCCKADDKETCFAEEGPNLVTRCKDALA

SEQ ID NO: 22 - protein, 584 aa, Artificial Sequence
  N terminal is residues 1 to 572 of HSA. C terminal is residues        573 to 584 of rabbit albumin.
DAHKSEVAHRFKDLGEENFKALVLIAFAQYLQQCPFEDHVKLVNEVTEFAKTCVADESAENCDKSLHTLFGDKLCTVATLRETYGEMADCCAKQEPERNECFLQHKDDNPNLPRLVRPEVDVMCTAFHDNEETFLKKYLYEIARRHPYFYAPELLFFAKRYKAAFTECCQAADKAACLLPKLDELRDEGKASSAKQRLKCASLQKFGERAFKAWAVARLSQRFPKAEFAEVSKLVTDLTKVHTECCHGDLLECADDRADLAKYICENQDSISSKLKECCEKPLLEKSHCIAEVENDEMPADLPSLAADFVESKDVCKNYAEAKDVFLGMFLYEYARRHPDYSVVLLLRLAKTYETTLEKCCAAADPHECYAKVFDEFKPLVEEPQNLIKQNCELFEQLGEYKFQNALLVRYTKKVPQVSTPTLVEVSRNLGKVGSKCCKHPEAKRMPCAEDYLSVVLNQLCVLHEKTPVSDRVTKCCTESLVNRRPCFSALEVDETYVPKEFNAETFTFHADICTLSEKERQIKKQTALVELVKHKPKATKEQLKAVMDDFAAFVEKCCKADDKETCFAEEGPKLVESSKATLG

SEQ ID NO: 23 - protein, 584 aa, Artificial Sequence
  N-terminal is residues 1 to 572 of HSA. C-terminal is residues 573 to 583 of sheep albumin.
DAHKSEVAHRFKDLGEENFKALVLIAFAQYLQQCPFEDHVKLVNEVTEFAKTCVADESAENCDKSLHTLFGDKLCTVATLRETYGEMADCCAKQEPERNECFLQHKDDNPNLPRLVRPEVDVMCTAFHDNEETFLKKYLYEIARRHPYFYAPELLFFAKRYKAAFTECCQAADKAACLLPKLDELRDEGKASSAKQRLKCASLQKFGERAFKAWAVARLSQRFPKAEFAEVSKLVTDLTKVHTECCHGDLLECADDRADLAKYICENQDSISSKLKECCEKPLLEKSHCIAEVENDEMPADLPSLAADFVESKDVCKNYAEAKDVFLGMFLYEYARRHPDYSVVLLLRLAKTYETTLEKCCAAADPHECYAKVFDEFKPLVEEPQNLIKQNCELFEQLGEYKFQNALLVRYTKKVPQVSTPTLVEVSRNLGKVGSKCCKHPEAKRMPCAEDYLSVVLNQLCVLHEKTPVSDRVTKCCTESLVNRRPCFSALEVDETYVPKEFNAETFTFHADICTLSEKERQIKKQTALVELVKHKPKATKEQLKAVMDDFAAFVEKCCKADDKETCFAEEGPKLVASTQAALA

SEQ ID NO: 24 - protein, 399 aa, Artificial Sequence
  Artificial albumin variant: human serum albumin domain 1 and human serum albumin domain 3
DAHKSEVAHRFKDLGEENFKALVLIAFAQYLQQCPFEDHVKLVNEVTEFAKTCVADESAENCDKSLHTLFGDKLCTVATLRETYGEMADCCAKQEPERNECFLQHKDDNPNLPRLVRPEVDVMCTAFHDNEETFLKKYLYEIARRHPYFYAPELLFFAKRYKAAFTECCQAADKAACLLPKLDELRDEGKASSAVEEPQNLIKQNCELFEQLGEYKFQNALLVRYTKKVPQVSTPTLVEVSRNLGKVGSKCCKHPEAKRMPCAEDYLSVVLNQLCVLHEKTPVSDRVTKCCTESLVNRRPCFSALEVDETYVPKEFNAETFTFHADICTLSEKERQIKKQTALVELVKHKPKATKEQLKAVMDDFAAFVEKCCKADDKETCFAEEGKKLVAASQAALGL

SEQ ID NO: 25 - protein, 400 aa, Artificial Sequence
  Artificial albumin variant: human serum albumin domain 2 and human serum albumin domain 3
DELRDEGKASSAKQRLKCASLQKFGERAFKAWAVARLSQRFPKAEFAEVSKLVTDLTKVHTECCHGDLLECADDRADLAKYICENQDSISSKLKECCEKPLLEKSHCIAEVENDEMPADLPSLAADFVESKDVCKNYAEAKDVFLGMFLYEYARRHPDYSVVLLLRLAKTYETTLEKCCAAADPHECYAKVFDEFKPLVEEPQNLIKQNCELFEQLGEYKFQNALLVRYTKKVPQVSTPTLVEVSRNLGKVGSKCCKHPEAKRMPCAEDYLSVVLNQLCVLHEKTPVSDRVTKCCTESLVNRRPCFSALEVDETYVPKEFNAETFTFHADICTLSEKERQIKKQTALVELVKHKPKATKEQLKAVMDDFAAFVEKCCKADDKETCFAEEGKKLVAASQAA

SEQ ID NO: 26 - protein, 410 aa, Artificial Sequence
  Artificial albumin variant: two consecutive copies of human serum albumin domain 3
VEEPQNLIKQNCELFEQLGEYKFQNALLVRYTKKVPQVSTPTLVEVSRNLGKVGSKCCKHPEAKRMPCAEDYLSVVLNQLCVLHEKTPVSDRVTKCCTESLVNRRPCFSALEVDETYVPKEFNAETFTFHADICTLSEKERQIKKQTALVELVKHKPKATKEQLKAVMDDFAAFVEKCCKADDKETCFAEEGKKLVAASQAALGLVEEPQNLIKQNCELFEQLGEYKFQNALLVRYTKKVPQVSTPTLVEVSRNLGKVGSKCCKHPEAKRMPCAEDYLSVVLNQLCVLHEKTPVSDRVTKCCTESLVNRRPCFSALEVDETYVPKEFNAETFTFHADICTLSEKERQIKKQTALVELVKHKPKATKEQLKAVMDDFAAFVEKCCKADDKETCFAEEGKKLVAASQAALGL

SEQ ID NO: 27 - protein, 205 aa, Artificial Sequence [sequence omitted]

SEQ ID NO: 28 - protein, 615 aa, Artificial Sequence
  HSA Domain III + HSA Domain III + HSA Domain III
VEEPQNLIKQNCELFEQLGEYKFQNALLVRYTKKVPQVSTPTLVEVSRNLGKVGSKCCKHPEAKRMPCAEDYLSVVLNQLCVLHEKTPVSDRVTKCCTESLVNRRPCFSALEVDETYVPKEFNAETFTFHADICTLSEKERQIKKQTALVELVKHKPKATKEQLKAVMDDFAAFVEKCCKADDKETCFAEEGKKLVAASQAALGLVEEPQNLIKQNCELFEQLGEYKFQNALLVRYTKKVPQVSTPTLVEVSRNLGKVGSKCCKHPEAKRMPCAEDYLSVVLNQLCVLHEKTPVSDRVTKCCTESLVNRRPCFSALEVDETYVPKEFNAETFTFHADICTLSEKERQIKKQTALVELVKHKPKATKEQLKAVMDDFAAFVEKCCKADDKETCFAEEGKKLVAASQAALGLVEEPQNLIKQNCELFEQLGEYKFQNALLVRYTKKVPQVSTPTLVEVSRNLGKVGSKCCKHPEAKRMPCAEDYLSVVLNQLCVLHEKTPVSDRVTKCCTESLVNRRPCFSALEVDETYVPKEFNAETFTFHADICTLSEKERQIKKQTALVELVKHKPKATKEQLKAVMDDFAAFVEKCCKADDKETCFAEEGKKLVAASQAALGL

SEQ ID NO: 29 - protein, 604 aa, Artificial Sequence
  HSA Domain I + HSA Domain III + HSA Domain III
DAHKSEVAHRFKDLGEENFKALVLIAFAQYLQQCPFEDHVKLVNEVTEFAKTCVADESAENCDKSLHTLFGDKLCTVATLRETYGEMADCCAKQEPERNECFLQHKDDNPNLPRLVRPEVDVMCTAFHDNEETFLKKYLYEIARRHPYFYAPELLFFAKRYKAAFTECCQAADKAACLLPKLDELRDEGKASSAVEEPQNLIKQNCELFEQLGEYKFQNALLVRYTKKVPQVSTPTLVEVSRNLGKVGSKCCKHPEAKRMPCAEDYLSVVLNQLCVLHEKTPVSDRVTKCCTESLVNRRPCFSALEVDETYVPKEFNAETFTFHADICTLSEKERQIKKQTALVELVKHKPKATKEQLKAVMDDFAAFVEKCCKADDKETCFAEEGKKLVAASQAALGLVEEPQNLIKQNCELFEQLGEYKFQNALLVRYTKKVPQVSTPTLVEVSRNLGKVGSKCCKHPEAKRMPCAEDYLSVVLNQLCVLHEKTPVSDRVTKCCTESLVNRRPCFSALEVDETYVPKEFNAETFTFHADICTLSEKERQIKKQTALVELVKHKPKATKEQLKAVMDDFAAFVEKCCKADDKETCFAEEGKKLVAASQAALGL

SEQ ID NO: 30 - protein, 290 aa, Homo sapiens
  misc_feature (1)..(290): Truncated heavy chain of the major histocompatibility complex class I-like Fc receptor (FCGRT) (together, SEQ ID No. 30 and SEQ ID No. 31 form FcRN)
MGVPRPQPWALGLLLFLLPGSLGAESHLSLLYHLTAVSSPAPGTPAFWVSGWLGPQQYLSYNSLRGEAEPCGAWVWENQVSWYWEKETTDLRIKEKLFLEAFKALGGKGPYTLQGLLGCELGPDNTSVPTAKFALNGEEFMNFDLKQGTWGGDWPEALAISQRWQQQDKAANKELTFLLFSCPHRLREHLERGRGNLEWKEPPSMRLKARPSSPGFSVLTCSAFSFYPPELQLRFLRNGLAAGTGQGDFGPNSDGSFHASSSLTVKSGDEHHYCCIVQHAGLAQPLRVEL

SEQ ID NO: 31 - protein, 119 aa, Homo sapiens
  misc_feature (1)..(119): Beta-2-microglobulin (together, SEQ ID No. 30 and SEQ ID No. 31 form FcRN)
MSRSVALAVLALLSLSGLEAIQRTPKIQVYSRHPAENGKSNFLNCYVSGFHPSDIEVDLLKNGERIEKVEHSDLSFSKDWSFYLLYYTEFTPTEKDEYACRVNHVTLSQPKIVKWDRDM

SEQ ID NO: 32 - protein, 584 aa, Artificial Sequence
  HSA 585stop
DAHKSEVAHRFKDLGEENFKALVLIAFAQYLQQCPFEDHVKLVNEVTEFAKTCVADESAENCDKSLHTLFGDKLCTVATLRETYGEMADCCAKQEPERNECFLQHKDDNPNLPRLVRPEVDVMCTAFHDNEETFLKKYLYEIARRHPYFYAPELLFFAKRYKAAFTECCQAADKAACLLPKLDELRDEGKASSAKQRLKCASLQKFGERAFKAWAVARLSQRFPKAEFAEVSKLVTDLTKVHTECCHGDLLECADDRADLAKYICENQDSISSKLKECCEKPLLEKSHCIAEVENDEMPADLPSLAADFVESKDVCKNYAEAKDVFLGMFLYEYARRHPDYSVVLLLRLAKTYETTLEKCCAAADPHECYAKVFDEFKPLVEEPQNLIKQNCELFEQLGEYKFQNALLVRYTKKVPQVSTPTLVEVSRNLGKVGSKCCKHPEAKRMPCAEDYLSVVLNQLCVLHEKTPVSDRVTKCCTESLVNRRPCFSALEVDETYVPKEFNAETFTFHADICTLSEKERQIKKQTALVELVKHKPKATKEQLKAVMDDFAAFVEKCCKADDKETCFAEEGKKLVAASQAALG

SEQ ID NO: 33 - protein, 583 aa, Artificial Sequence
  HSA 584stop
DAHKSEVAHRFKDLGEENFKALVLIAFAQYLQQCPFEDHVKLVNEVTEFAKTCVADESAENCDKSLHTLFGDKLCTVATLRETYGEMADCCAKQEPERNECFLQHKDDNPNLPRLVRPEVDVMCTAFHDNEETFLKKYLYEIARRHPYFYAPELLFFAKRYKAAFTECCQAADKAACLLPKLDELRDEGKASSAKQRLKCASLQKFGERAFKAWAVARLSQRFPKAEFAEVSKLVTDLTKVHTECCHGDLLECADDRADLAKYICENQDSISSKLKECCEKPLLEKSHCIAEVENDEMPADLPSLAADFVESKDVCKNYAEAKDVFLGMFLYEYARRHPDYSVVLLLRLAKTYETTLEKCCAAADPHECYAKVFDEFKPLVEEPQNLIKQNCELFEQLGEYKFQNALLVRYTKKVPQVSTPTLVEVSRNLGKVGSKCCKHPEAKRMPCAEDYLSVVLNQLCVLHEKTPVSDRVTKCCTESLVNRRPCFSALEVDETYVPKEFNAETFTFHADICTLSEKERQIKKQTALVELVKHKPKATKEQLKAVMDDFAAFVEKCCKADDKETCFAEEGKKLVAASQAAL

SEQ ID NO: 34 - protein, 582 aa, Artificial Sequence
  HSA 583stop
DAHKSEVAHRFKDLGEENFKALVLIAFAQYLQQCPFEDHVKLVNEVTEFAKTCVADESAENCDKSLHTLFGDKLCTVATLRETYGEMADCCAKQEPERNECFLQHKDDNPNLPRLVRPEVDVMCTAFHDNEETFLKKYLYEIARRHPYFYAPELLFFAKRYKAAFTECCQAADKAACLLPKLDELRDEGKASSAKQRLKCASLQKFGERAFKAWAVARLSQRFPKAEFAEVSKLVTDLTKVHTECCHGDLLECADDRADLAKYICENQDSISSKLKECCEKPLLEKSHCIAEVENDEMPADLPSLAADFVESKDVCKNYAEAKDVFLGMFLYEYARRHPDYSVVLLLRLAKTYETTLEKCCAAADPHECYAKVFDEFKPLVEEPQNLIKQNCELFEQLGEYKFQNALLVRYTKKVPQVSTPTLVEVSRNLGKVGSKCCKHPEAKRMPCAEDYLSVVLNQLCVLHEKTPVSDRVTKCCTESLVNRRPCFSALEVDETYVPKEFNAETFTFHADICTLSEKERQIKKQTALVELVKHKPKATKEQLKAVMDDFAAFVEKCCKADDKETCFAEEGKKLVAASQAA

SEQ ID NO: 35 - protein, 581 aa, Artificial Sequence
  HSA 582stop
DAHKSEVAHRFKDLGEENFKALVLIAFAQYLQQCPFEDHVKLVNEVTEFAKTCVADESAENCDKSLHTLFGDKLCTVATLRETYGEMADCCAKQEPERNECFLQHKDDNPNLPRLVRPEVDVMCTAFHDNEETFLKKYLYEIARRHPYFYAPELLFFAKRYKAAFTECCQAADKAACLLPKLDELRDEGKASSAKQRLKCASLQKFGERAFKAWAVARLSQRFPKAEFAEVSKLVTDLTKVHTECCHGDLLECADDRADLAKYICENQDSISSKLKECCEKPLLEKSHCIAEVENDEMPADLPSLAADFVESKDVCKNYAEAKDVFLGMFLYEYARRHPDYSVVLLLRLAKTYETTLEKCCAAADPHECYAKVFDEFKPLVEEPQNLIKQNCELFEQLGEYKFQNALLVRYTKKVPQVSTPTLVEVSRNLGKVGSKCCKHPEAKRMPCAEDYLSVVLNQLCVLHEKTPVSDRVTKCCTESLVNRRPCFSALEVDETYVPKEFNAETFTFHADICTLSEKERQIKKQTALVELVKHKPKATKEQLKAVMDDFAAFVEKCCKADDKETCFAEEGKKLVAASQA

SEQ ID NO: 36 - protein, 580 aa, Artificial Sequence
  HSA 581stop
DAHKSEVAHRFKDLGEENFKALVLIAFAQYLQQCPFEDHVKLVNEVTEFAKTCVADESAENCDKSLHTLFGDKLCTVATLRETYGEMADCCAKQEPERNECFLQHKDDNPNLPRLVRPEVDVMCTAFHDNEETFLKKYLYEIARRHPYFYAPELLFFAKRYKAAFTECCQAADKAACLLPKLDELRDEGKASSAKQRLKCASLQKFGERAFKAWAVARLSQRFPKAEFAEVSKLVTDLTKVHTECCHGDLLECADDRADLAKYICENQDSISSKLKECCEKPLLEKSHCIAEVENDEMPADLPSLAADFVESKDVCKNYAEAKDVFLGMFLYEYARRHPDYSVVLLLRLAKTYETTLEKCCAAADPHECYAKVFDEFKPLVEEPQNLIKQNCELFEQLGEYKFQNALLVRYTKKVPQVSTPTLVEVSRNLGKVGSKCCKHPEAKRMPCAEDYLSVVLNQLCVLHEKTPVSDRVTKCCTESLVNRRPCFSALEVDETYVPKEFNAETFTFHADICTLSEKERQIKKQTALVELVKHKPKATKEQLKAVMDDFAAFVEKCCKADDKETCFAEEGKKLVAASQ

SEQ ID NO: 37 - protein, 576 aa, Artificial Sequence
  HSA 580stop
DAHKSEVAHRFKDLGEENFKALVLIAFAQYLQQCPFEDHVKLVNEVTEFAKTCVADESAENCDKSLHTLFGDKLCTVATLRETYGEMADCCAKQEPERNECFLQHKDDNPNLPRLVRPEVDVMCTAFHDNEETFLKKYLYEIARRHPYFYAPELLFFAKRYKAAFTECCQAADKAACLLPKLDELRDEGKASSAKQRLKCASLQKFGERAFKAWAVARLSQRFPKAEFAEVSKLVTDLTKVHTECCHGDLLECADDRADLAKYICENQDSISSKLKECCEKPLLEKSHCIAEVENDEMPADLPSLAADFVESKDVCKNYAEAKDVFLGMFLYEYARRHPDYSVVLLLRLAKTYETTLEKCCAAADPHECYAKVFDEFKPLVEEPQNLIKQNCELFEQLGEYKFQNALLVRYTKKVPQVSTPTLVEVSRNLGKVGSKCCKHPEAKRMPCAEDYLSVVLNQLCVLHEKTPVSDRVTKCCTESLVNRRPCFSALEVDETYVPKEFNAETFTFHADICTLSEKERQIKKQTALVELVKHKPKATKEQLKAVMDDFAAFVEKCCKADDKETCFAEEGKKLV

SEQ ID NO: 38 - protein, 576 aa, Artificial Sequence; identical to SEQ ID NO: 37
  HSA 579stop

SEQ ID NO: 39 - protein, 576 aa, Artificial Sequence; identical to SEQ ID NO: 37
  HSA 578stop

SEQ ID NO: 40 - protein, 576 aa, Artificial Sequence; identical to SEQ ID NO: 37
  HSA 577stop

SEQ ID NO: 41 - protein, 575 aa, Artificial Sequence
  HSA 576stop
DAHKSEVAHRFKDLGEENFKALVLIAFAQYLQQCPFEDHVKLVNEVTEFAKTCVADESAENCDKSLHTLFGDKLCTVATLRETYGEMADCCAKQEPERNECFLQHKDDNPNLPRLVRPEVDVMCTAFHDNEETFLKKYLYEIARRHPYFYAPELLFFAKRYKAAFTECCQAADKAACLLPKLDELRDEGKASSAKQRLKCASLQKFGERAFKAWAVARLSQRFPKAEFAEVSKLVTDLTKVHTECCHGDLLECADDRADLAKYICENQDSISSKLKECCEKPLLEKSHCIAEVENDEMPADLPSLAADFVESKDVCKNYAEAKDVFLGMFLYEYARRHPDYSVVLLLRLAKTYETTLEKCCAAADPHECYAKVFDEFKPLVEEPQNLIKQNCELFEQLGEYKFQNALLVRYTKKVPQVSTPTLVEVSRNLGKVGSKCCKHPEAKRMPCAEDYLSVVLNQLCVLHEKTPVSDRVTKCCTESLVNRRPCFSALEVDETYVPKEFNAETFTFHADICTLSEKERQIKKQTALVELVKHKPKATKEQLKAVMDDFAAFVEKCCKADDKETCFAEEGKKL

SEQ ID NO: 42 - protein, 574 aa, Artificial Sequence
  HSA 575stop
DAHKSEVAHRFKDLGEENFKALVLIAFAQYLQQCPFEDHVKLVNEVTEFAKTCVADESAENCDKSLHTLFGDKLCTVATLRETYGEMADCCAKQEPERNECFLQHKDDNPNLPRLVRPEVDVMCTAFHDNEETFLKKYLYEIARRHPYFYAPELLFFAKRYKAAFTECCQAADKAACLLPKLDELRDEGKASSAKQRLKCASLQKFGERAFKAWAVARLSQRFPKAEFAEVSKLVTDLTKVHTECCHGDLLECADDRADLAKYICENQDSISSKLKECCEKPLLEKSHCIAEVENDEMPADLPSLAADFVESKDVCKNYAEAKDVFLGMFLYEYARRHPDYSVVLLLRLAKTYETTLEKCCAAADPHECYAKVFDEFKPLVEEPQNLIKQNCELFEQLGEYKFQNALLVRYTKKVPQVSTPTLVEVSRNLGKVGSKCCKHPEAKRMPCAEDYLSVVLNQLCVLHEKTPVSDRVTKCCTESLVNRRPCFSALEVDETYVPKEFNAETFTFHADICTLSEKERQIKKQTALVELVKHKPKATKEQLKAVMDDFAAFVEKCCKADDKETCFAEEGKK

SEQ ID NO: 43 - protein, 573 aa, Artificial Sequence
  HSA 574stop
DAHKSEVAHRFKDLGEENFKALVLIAFAQYLQQCPFEDHVKLVNEVTEFAKTCVADESAENCDKSLHTLFGDKLCTVATLRETYGEMADCCAKQEPERNECFLQHKDDNPNLPRLVRPEVDVMCTAFHDNEETFLKKYLYEIARRHPYFYAPELLFFAKRYKAAFTECCQAADKAACLLPKLDELRDEGKASSAKQRLKCASLQKFGERAFKAWAVARLSQRFPKAEFAEVSKLVTDLTKVHTECCHGDLLECADDRADLAKYICENQDSISSKLKECCEKPLLEKSHCIAEVENDEMPADLPSLAADFVESKDVCKNYAEAKDVFLGMFLYEYARRHPDYSVVLLLRLAKTYETTLEKCCAAADPHECYAKVFDEFKPLVEEPQNLIKQNCELFEQLGEYKFQNALLVRYTKKVPQVSTPTLVEVSRNLGKVGSKCCKHPEAKRMPCAEDYLSVVLNQLCVLHEKTPVSDRVTKCCTESLVNRRPCFSALEVDETYVPKEFNAETFTFHADICTLSEKERQIKKQTALVELVKHKPKATKEQLKAVMDDFAAFVEKCCKADDKETCFAEEGK

SEQ ID NO: 44 - protein, 571 aa, Artificial Sequence
  HSA 572stop
DAHKSEVAHRFKDLGEENFKALVLIAFAQYLQQCPFEDHVKLVNEVTEFAKTCVADESAENCDKSLHTLFGDKLCTVATLRETYGEMADCCAKQEPERNECFLQHKDDNPNLPRLVRPEVDVMCTAFHDNEETFLKKYLYEIARRHPYFYAPELLFFAKRYKAAFTECCQAADKAACLLPKLDELRDEGKASSAKQRLKCASLQKFGERAFKAWAVARLSQRFPKAEFAEVSKLVTDLTKVHTECCHGDLLECADDRADLAKYICENQDSISSKLKECCEKPLLEKSHCIAEVENDEMPADLPSLAADFVESKDVCKNYAEAKDVFLGMFLYEYARRHPDYSVVLLLRLAKTYETTLEKCCAAADPHECYAKVFDEFKPLVEEPQNLIKQNCELFEQLGEYKFQNALLVRYTKKVPQVSTPTLVEVSRNLGKVGSKCCKHPEAKRMPCAEDYLSVVLNQLCVLHEKTPVSDRVTKCCTESLVNRRPCFSALEVDETYVPKEFNAETFTFHADICTLSEKERQIKKQTALVELVKHKPKATKEQLKAVMDDFAAFVEKCCKADDKETCFAEE

SEQ ID NO: 45 - protein, 567 aa, Artificial Sequence
  HSA 568stop
DAHKSEVAHRFKDLGEENFKALVLIAFAQYLQQCPFEDHVKLVNEVTEFAKTCVADESAENCDKSLHTLFGDKLCTVATLRETYGEMADCCAKQEPERNECFLQHKDDNPNLPRLVRPEVDVMCTAFHDNEETFLKKYLYEIARRHPYFYAPELLFFAKRYKAAFTECCQAADKAACLLPKLDELRDEGKASSAKQRLKCASLQKFGERAFKAWAVARLSQRFPKAEFAEVSKLVTDLTKVHTECCHGDLLECADDRADLAKYICENQDSISSKLKECCEKPLLEKSHCIAEVENDEMPADLPSLAADFVESKDVCKNYAEAKDVFLGMFLYEYARRHPDYSVVLLLRLAKTYETTLEKCCAAADPHECYAKVFDEFKPLVEEPQNLIKQNCELFEQLGEYKFQNALLVRYTKKVPQVSTPTLVEVSRNLGKVGSKCCKHPEAKRMPCAEDYLSVVLNQLCVLHEKTPVSDRVTKCCTESLVNRRPCFSALEVDETYVPKEFNAETFTFHADICTLSEKERQIKKQTALVELVKHKPKATKEQLKAVMDDFAAFVEKCCKADDKETC

SEQ ID NO: 46 - DNA, 17 bp, Artificial Sequence
  Oligonucleotide: xAP265
gctcgcctgagccagag

SEQ ID NO: 47 - DNA, 30 bp, Artificial Sequence
  Oligonucleotide: xAP294
gaattaagcttattattagcctaaggcagc

SEQ ID NO: 48 - DNA, 30 bp, Artificial Sequence
  Oligonucleotide: xAP295
gaattaagcttattataattataaggcagc

SEQ ID NO: 49 - DNA, 33 bp, Artificial Sequence
  Oligonucleotide: xAP296
gaattaagcttattataagccttaggcagcttg

SEQ ID NO: 50 - DNA, 39 bp, Artificial Sequence
  Oligonucleotide: xAP297
gaattaagcttattataagcctaattaggcttgacttgc

SEQ ID NO: 51 - DNA, 48 bp, Artificial Sequence
  Oligonucleotide: xAP298
gaattaagcttattataagcctaaggcttattgacttgcagcaacaag

SEQ ID NO: 52 - DNA, 48 bp, Artificial Sequence
  Oligonucleotide: xAP299
gaattaagcttattataagcctaaggcagcttaacttgcagcaacaag

SEQ ID NO: 53 - DNA, 48 bp, Artificial Sequence
  Oligonucleotide: xAP300
gaattaagcttattataagcctaaggcagcttgttatgcagcaacaag

SEQ ID NO: 54 - DNA, 48 bp, Artificial Sequence
  Oligonucleotide: xAP301
gaattaagcttattataagcctaaggcagcttgactttaagcaacaag

SEQ ID NO: 55 - DNA, 56 bp, Artificial Sequence
  Oligonucleotide: xAP302
gaattaagcttattataagcctaaggcagcttgacttgcttaaacaagttttttac

SEQ ID NO: 56 - DNA, 56 bp, Artificial Sequence
  Oligonucleotide: xAP303
gaattaagcttattataagcctaaggcagcttgacttgcagcttaaagttttttac

SEQ ID NO: 57 - DNA, 60 bp, Artificial Sequence
  Oligonucleotide: xAP304
gaattaagcttattataagcctaaggcagcttgacttgcagcaacttattttttaccctc

SEQ ID NO: 58 - DNA, 60 bp, Artificial Sequence
  Oligonucleotide: xAP305
gaattaagcttattataagcctaaggcagcttgacttgcagcaacaagttatttaccctc

SEQ ID NO: 59 - DNA, 63 bp, Artificial Sequence
  Oligonucleotide: xAP306
gaattaagcttattataagcctaaggcagcttgacttgcagcaacaagttttttttactcctc

SEQ ID NO: 60 - DNA, 74 bp, Artificial Sequence
  Oligonucleotide: xAP307
gaattaagcttattataagcctaaggcagcttgacttgcagcaacaagttttttaccctcctcggcttagcagg

SEQ ID NO: 61 - DNA, 28 bp, Artificial Sequence
  Oligonucleotide: xAP314
ctcaagaaacctaggaaaagtgggcagc

SEQ ID NO: 62 - protein, 584 aa, Artificial Sequence
  HSA K574A
AHKSEVAHRFKDLGEENFKALVLIAFAQYLQQCPFEDHVKLVNEVTEFAKTCVADESAENCDKSLHTLFGDKLCTVATLRETYGEMADCCAKQEPERNECFLQHKDDNPNLPRLVRPEVDVMCTAFHDNEETFLKKYLYEIARRHPYFYAPELLFFAKRYKAAFTECCQAADKAACLLPKLDELRDEGKASSAKQRLKCASLQKFGERAFKAWAVARLSQRFPKAEFAEVSKLVTDLTKVHTECCHGDLLECADDRADLAKYICENQDSISSKLKECCEKPLLEKSHCIAEVENDEMPADLPSLAADFVESKDVCKNYAEAKDVFLGMFLYEYARRHPDYSVVLLLRLAKTYETTLEKCCAAADPHECYAKVFDEFKPLVEEPQNLIKQNCELFEQLGEYKFQNALLVRYTKKVPQVSTPTLVEVSRNLGKVGSKCCKHPEAKRMPCAEDYLSVVLNQLCVLHEKTPVSDRVTKCCTESLVNRRPCFSALEVDETYVPKEFNAETFTFHADICTLSEKERQIKKQTALVELVKHKPKATKEQLKAVMDDFAAFVEKCCKADDKETCFAEEGKALVAASQAALGL

SEQ ID NO: 63 - protein, 585 aa, Artificial Sequence
  HSA Q580A
DAHKSEVAHRFKDLGEENFKALVLIAFAQYLQQCPFEDHVKLVNEVTEFAKTCVADESAENCDKSLHTLFGDKLCTVATLRETYGEMADCCAKQEPERNECFLQHKDDNPNLPRLVRPEVDVMCTAFHDNEETFLKKYLYEIARRHPYFYAPELLFFAKRYKAAFTECCQAADKAACLLPKLDELRDEGKASSAKQRLKCASLQKFGERAFKAWAVARLSQRFPKAEFAEVSKLVTDLTKVHTECCHGDLLECADDRADLAKYICENQDSISSKLKECCEKPLLEKSHCIAEVENDEMPADLPSLAADFVESKDVCKNYAEAKDVFLGMFLYEYARRHPDYSVVLLLRLAKTYETTLEKCCAAADPHECYAKVFDEFKPLVEEPQNLIKQNCELFEQLGEYKFQNALLVRYTKKVPQVSTPTLVEVSRNLGKVGSKCCKHPEAKRMPCAEDYLSVVLNQLCVLHEKTPVSDRVTKCCTESLVNRRPCFSALEVDETYVPKEFNAETFTFHADICTLSEKERQIKKQTALVELVKHKPKATKEQLKAVMDDFAAFVEKCCKADDKETCFAEEGKKLVAASAAALGL

SEQ ID NO: 64 - protein, 585 aa, Artificial Sequence
  HSA K573P, Q580A
DAHKSEVAHRFKDLGEENFKALVLIAFAQYLQQCPFEDHVKLVNEVTEFAKTCVADESAENCDKSLHTLFGDKLCTVATLRETYGEMADCCAKQEPERNECFLQHKDDNPNLPRLVRPEVDVMCTAFHDNEETFLKKYLYEIARRHPYFYAPELLFFAKRYKAAFTECCQAADKAACLLPKLDELRDEGKASSAKQRLKCASLQKFGERAFKAWAVARLSQRFPKAEFAEVSKLVTDLTKVHTECCHGDLLECADDRADLAKYICENQDSISSKLKECCEKPLLEKSHCIAEVENDEMPADLPSLAADFVESKDVCKNYAEAKDVFLGMFLYEYARRHPDYSVVLLLRLAKTYETTLEKCCAAADPHECYAKVFDEFKPLVEEPQNLIKQNCELFEQLGEYKFQNALLVRYTKKVPQVSTPTLVEVSRNLGKVGSKCCKHPEAKRMPCAEDYLSVVLNQLCVLHEKTPVSDRVTKCCTESLVNRRPCFSALEVDETYVPKEFNAETFTFHADICTLSEKERQIKKQTALVELVKHKPKATKEQLKAVMDDFAAFVEKCCKADDKETCFAEEGPKLVAASAAALGL

SEQ ID NO: 65 - DNA, 48 bp, Artificial Sequence
  Oligonucleotide xAP308
gaattaagcttattataagcctaaggcagcagcacttgcagcaacaag

SEQ ID NO: 66 - DNA, 60 bp, Artificial Sequence
  Oligonucleotide xAP309
gaattaagcttattataagcctaaggcagcttgacttgcagcaacaagagctttaccctc

SEQ ID NO: 67 - DNA, 61 bp, Artificial Sequence
  Oligonucleotide xAP311
gaattaagcttattataagcctaaggcagcagcacttgcagcaacaagttttggaccctcc

SEQ ID NO: 68 - protein, 585 aa, Artificial Sequence
  HSA L575F
DAHKSEVAHRFKDLGEENFKALVLIAFAQYLQQCPFEDHVKLVNEVTEFAKTCVADESAENCDKSLHTLFGDKLCTVATLRETYGEMADCCAKQEPERNECFLQHKDDNPNLPRLVRPEVDVMCTAFHDNEETFLKKYLYEIARRHPYFYAPELLFFAKRYKAAFTECCQAADKAACLLPKLDELRDEGKASSAKQRLKCASLQKFGERAFKAWAVARLSQRFPKAEFAEVSKLVTDLTKVHTECCHGDLLECADDRADLAKYICENQDSISSKLKECCEKPLLEKSHCIAEVENDEMPADLPSLAADFVESKDVCKNYAEAKDVFLGMFLYEYARRHPDYSVVLLLRLAKTYETTLEKCCAAADPHECYAKVFDEFKPLVEEPQNLIKQNCELFEQLGEYKFQNALLVRYTKKVPQVSTPTLVEVSRNLGKVGSKCCKHPEAKRMPCAEDYLSVVLNQLCVLHEKTPVSDRVTKCCTESLVNRRPCFSALEVDETYVPKEFNAETFTFHADICTLSEKERQIKKQTALVELVKHKPKATKEQLKAVMDDFAAFVEKCCKADDKETCFAEEGKKFVAASQAALGL

SEQ ID NO: 69 - protein, 585 aa, Artificial Sequence
  HSA N503D
DAHKSEVAHRFKDLGEENFKALVLIAFAQYLQQCPFEDHVKLVNEVTEFAKTCVADESAENCDKSLHTLFGDKLCTVATLRETYGEMADCCAKQEPERNECFLQHKDDNPNLPRLVRPEVDVMCTAFHDNEETFLKKYLYEIARRHPYFYAPELLFFAKRYKAAFTECCQAADKAACLLPKLDELRDEGKASSAKQRLKCASLQKFGERAFKAWAVARLSQRFPKAEFAEVSKLVTDLTKVHTECCHGDLLECADDRADLAKYICENQDSISSKLKECCEKPLLEKSHCIAEVENDEMPADLPSLAADFVESKDVCKNYAEAKDVFLGMFLYEYARRHPDYSVVLLLRLAKTYETTLEKCCAAADPHECYAKVFDEFKPLVEEPQNLIKQNCELFEQLGEYKFQNALLVRYTKKVPQVSTPTLVEVSRNLGKVGSKCCKHPEAKRMPCAEDYLSVVLNQLCVLHEKTPVSDRVTKCCTESLVNRRPCFSALEVDETYVPKEFDAETFTFHADICTLSEKERQIKKQTALVELVKHKPKATKEQLKAVMDDFAAFVEKCCKADDKETCFAEEGKKLVAASQAALGL

SEQ ID NO: 70 - protein, 585 aa, Artificial Sequence
  HSA E505Q
DAHKSEVAHRFKDLGEENFKALVLIAFAQYLQQCPFEDHVKLVNEVTEFAKTCVADESAENCDKSLHTLFGDKLCTVATLRETYGEMADCCAKQEPERNECFLQHKDDNPNLPRLVRPEVDVMCTAFHDNEETFLKKYLYEIARRHPYFYAPELLFFAKRYKAAFTECCQAADKAACLLPKLDELRDEGKASSAKQRLKCASLQKFGERAFKAWAVARLSQRFPKAEFAEVSKLVTDLTKVHTECCHGDLLECADDRADLAKYICENQDSISSKLKECCEKPLLEKSHCIAEVENDEMPADLPSLAADFVESKDVCKNYAEAKDVFLGMFLYEYARRHPDYSVVLLLRLAKTYETTLEKCCAAADPHECYAKVFDEFKPLVEEPQNLIKQNCELFEQLGEYKFQNALLVRYTKKVPQVSTPTLVEVSRNLGKVGSKCCKHPEAKRMPCAEDYLSVVLNQLCVLHEKTPVSDRVTKCCTESLVNRRPCFSALEVDETYVPKEFNAQTFTFHADICTLSEKERQIKKQTALVELVKHKPKATKEQLKAVMDDFAAFVEKCCKADDKETCFAEEGKKLVAASQAALGL

SEQ ID NO: 71 - protein, 585 aa, Artificial Sequence
  HSA H510D
DAHKSEVAHRFKDLGEENFKALVLIAFAQYLQQCPFEDHVKLVNEVTEFAKTCVADESAENCDKSLHTLFGDKLCTVATLRETYGEMADCCAKQEPERNECFLQHKDDNPNLPRLVRPEVDVMCTAFHDNEETFLKKYLYEIARRHPYFYAPELLFFAKRYKAAFTECCQAADKAACLLPKLDELRDEGKASSAKQRLKCASLQKFGERAFKAWAVARLSQRFPKAEFAEVSKLVTDLTKVHTECCHGDLLECADDRADLAKYICENQDSISSKLKECCEKPLLEKSHCIAEVENDEMPADLPSLAADFVESKDVCKNYAEAKDVFLGMFLYEYARRHPDYSVVLLLRLAKTYETTLEKCCAAADPHECYAKVFDEFKPLVEEPQNLIKQNCELFEQLGEYKFQNALLVRYTKKVPQVSTPTLVEVSRNLGKVGSKCCKHPEAKRMPCAEDYLSVVLNQLCVLHEKTPVSDRVTKCCTESLVNRRPCFSALEVDETYVPKEFNAETFTFDADICTLSEKERQIKKQTALVELVKHKPKATKEQLKAVMDDFAAFVEKCCKADDKETCFAEEGKKLVAASQAALGL

SEQ ID NO: 72 - protein, 585 aa, Artificial Sequence
  HSA H510E
DAHKSEVAHRFKDLGEENFKALVLIAFAQYLQQCPFEDHVKLVNEVTEFAKTCVADESAENCDKSLHTLFGDKLCTVATLRETYGEMADCCAKQEPERNECFLQHKDDNPNLPRLVRPEVDVMCTAFHDNEETFLKKYLYEIARRHPYFYAPELLFFAKRYKAAFTECCQAADKAACLLPKLDELRDEGKASSAKQRLKCASLQKFGERAFKAWAVARLSQRFPKAEFAEVSKLVTDLTKVHTECCHGDLLECADDRADLAKYICENQDSISSKLKECCEKPLLEKSHCIAEVENDEMPADLPSLAADFVESKDVCKNYAEAKDVFLGMFLYEYARRHPDYSVVLLLRLAKTYETTLEKCCAAADPHECYAKVFDEFKPLVEEPQNLIKQNCELFEQLGEYKFQNALLVRYTKKVPQVSTPTLVEVSRNLGKVGSKCCKHPEAKRMPCAEDYLSVVLNQLCVLHEKTPVSDRVTKCCTESLVNRRPCFSALEVDETYVPKEFNAETFTFEADICTLSEKERQIKKQTALVELVKHKPKATKEQLKAVMDDFAAFVEKCCKADDKETCFAEEGKKLVAASQAALGL

SEQ ID NO: 73 - protein, 585 aa, Artificial Sequence
  HSA H512E
DAHKSEVAHRFKDLGEENFKALVLIAFAQYLQQCPFEDHVKLVNEVTEFAKTCVADESAENCDKSLHTLFGDKLCTVATLRETYGEMADCCAKQEPERNECFLQHKDDNPNLPRLVRPEVDVMCTAFHDNEETFLKKYLYEIARRHPYFYAPELLFFAKRYKAAFTECCQAADKAACLLPKLDELRDEGKASSAKQRLKCASLQKFGERAFKAWAVARLSQRFPKAEFAEVSKLVTDLTKVHTECCHGDLLECADDRADLAKYICENQDSISSKLKECCEKPLLEKSHCIAEVENDEMPADLPSLAADFVESKDVCKNYAEAKDVFLGMFLYEYARRHPDYSVVLLLRLAKTYETTLEKCCAAADPHECYAKVFDEFKPLVEEPQNLIKQNCELFEQLGEYKFQNALLVRYTKKVPQVSTPTLVEVSRNLGKVGSKCCKHPEAKRMPCAEDYLSVVLNQLCVLHEKTPVSDRVTKCCTESLVNRRPCFSALEVDETYVPKEFNAETFTFHAEICTLSEKERQIKKQTALVELVKHKPKATKEQLKAVMDDFAAFVEKCCKADDKETCFAEEGKKLVAASQAALGL

SEQ ID NO: 74 - protein, 585 aa, Artificial Sequence
  HSA D512A
DAHKSEVAHRFKDLGEENFKALVLIAFAQYLQQCPFEDHVKLVNEVTEFAKTCVADESAENCDKSLHTLFGDKLCTVATLRETYGEMADCCAKQEPERNECFLQHKDDNPNLPRLVRPEVDVMCTAFHDNEETFLKKYLYEIARRHPYFYAPELLFFAKRYKAAFTECCQAADKAACLLPKLDELRDEGKASSAKQRLKCASLQKFGERAFKAWAVARLSQRFPKAEFAEVSKLVTDLTKVHTECCHGDLLECADDRADLAKYICENQDSISSKLKECCEKPLLEKSHCIAEVENDEMPADLPSLAADFVESKDVCKNYAEAKDVFLGMFLYEYARRHPDYSVVLLLRLAKTYETTLEKCCAAADPHECYAKVFDEFKPLVEEPQNLIKQNCELFEQLGEYKFQNALLVRYTKKVPQVSTPTLVEVSRNLGKVGSKCCKHPEAKRMPCAEDYLSVVLNQLCVLHEKTPVSDRVTKCCTESLVNRRPCFSALEVDETYVPKEFNAETFTFHAAICTLSEKERQIKKQTALVELVKHKPKATKEQLKAVMDDFAAFVEKCCKADDKETCFAEEGKKLVAASQAALGL

SEQ ID NO: 75 - protein, 585 aa, Artificial Sequence
  HSA E565V
DAHKSEVAHRFKDLGEENFKALVLIAFAQYLQQCPFEDHVKLVNEVTEFAKTCVADESAENCDKSLHTLFGDKLCTVATLRETYGEMADCCAKQEPERNECFLQHKDDNPNLPRLVRPEVDVMCTAFHDNEETFLKKYLYEIARRHPYFYAPELLFFAKRYKAAFTECCQAADKAACLLPKLDELRDEGKASSAKQRLKCASLQKFGERAFKAWAVARLSQRFPKAEFAEVSKLVTDLTKVHTECCHGDLLECADDRADLAKYICENQDSISSKLKECCEKPLLEKSHCIAEVENDEMPADLPSLAADFVESKDVCKNYAEAKDVFLGMFLYEYARRHPDYSVVLLLRLAKTYETTLEKCCAAADPHECYAKVFDEFKPLVEEPQNLIKQNCELFEQLGEYKFQNALLVRYTKKVPQVSTPTLVEVSRNLGKVGSKCCKHPEAKRMPCAEDYLSVVLNQLCVLHEKTPVSDRVTKCCTESLVNRRPCFSALEVDETYVPKEFNAETFTFHADICTLSEKERQIKKQTALVELVKHKPKATKEQLKAVMDDFAAFVEKCCKADDKVTCFAEEGKKLVAASQAALGL

SEQ ID NO: 76 - protein, 585 aa, Artificial Sequence
  HSA A569V
DAHKSEVAHRFKDLGEENFKALVLIAFAQYLQQCPFEDHVKLVNEVTEFAKTCVADESAENCDKSLHTLFGDKLCTVATLRETYGEMADCCAKQEPERNECFLQHKDDNPNLPRLVRPEVDVMCTAFHDNEETFLKKYLYEIARRHPYFYAPELLFFAKRYKAAFTECCQAADKAACLLPKLDELRDEGKASSAKQRLKCASLQKFGERAFKAWAVARLSQRFPKAEFAEVSKLVTDLTKVHTECCHGDLLECADDRADLAKYICENQDSISSKLKECCEKPLLEKSHCIAEVENDEMPADLPSLAADFVESKDVCKNYAEAKDVFLGMFLYEYARRHPDYSVVLLLRLAKTYETTLEKCCAAADPHECYAKVFDEFKPLVEEPQNLIKQNCELFEQLGEYKFQNALLVRYTKKVPQVSTPTLVEVSRNLGKVGSKCCKHPEAKRMPCAEDYLSVVLNQLCVLHEKTPVSDRVTKCCTESLVNRRPCFSALEVDETYVPKEFNAETFTFHADICTLSEKERQIKKQTALVELVKHKPKATKEQLKAVMDDFAAFVEKCCKADDKETCFVEEGKKLVAASQAALGL

SEQ ID NO: 77 - protein, 585 aa, Artificial Sequence
  HSA A569L
DAHKSEVAHRFKDLGEENFKALVLIAFAQYLQQCPFEDHVKLVNEVTEFAKTCVADESAENCDKSLHTLFGDKLCTVATLRETYGEMADCCAKQEPERNECFLQHKDDNPNLPRLVRPEVDVMCTAFHDNEETFLKKYLYEIARRHPYFYAPELLFFAKRYKAAFTECCQAADKAACLLPKLDELRDEGKASSAKQRLKCASLQKFGERAFKAWAVARLSQRFPKAEFAEVSKLVTDLTKVHTECCHGDLLECADDRADLAKYICENQDSISSKLKECCEKPLLEKSHCIAEVENDEMPADLPSLAADFVESKDVCKNYAEAKDVFLGMFLYEYARRHPDYSVVLLLRLAKTYETTLEKCCAAADPHECYAKVFDEFKPLVEEPQNLIKQNCELFEQLGEYKFQNALLVRYTKKVPQVSTPTLVEVSRNLGKVGSKCCKHPEAKRMPCAEDYLSVVLNQLCVLHEKTPVSDRVTKCCTESLVNRRPCFSALEVDETYVPKEFNAETFTFHADICTLSEKERQIKKQTALVELVKHKPKATKEQLKAVMDDFAAFVEKCCKADDKETCFLEEGKKLVAASQAALGL

SEQ ID NO: 78 - protein, 585 aa, Artificial Sequence
  HSA V576F
DAHKSEVAHRFKDLGEENFKALVLIAFAQYLQQCPFEDHVKLVNEVTEFAKTCVADESAENCDKSLHTLFGDKLCTVATLRETYGEMADCCAKQEPERNECFLQHKDDNPNLPRLVRPEVDVMCTAFHDNEETFLKKYLYEIARRHPYFYAPELLFFAKRYKAAFTECCQAADKAACLLPKLDELRDEGKASSAKQRLKCASLQKFGERAFKAWAVARLSQRFPKAEFAEVSKLVTDLTKVHTECCHGDLLECADDRADLAKYICENQDSISSKLKECCEKPLLEKSHCIAEVENDEMPADLPSLAADFVESKDVCKNYAEAKDVFLGMFLYEYARRHPDYSVVLLLRLAKTYETTLEKCCAAADPHECYAKVFDEFKPLVEEPQNLIKQNCELFEQLGEYKFQNALLVRYTKKVPQVSTPTLVEVSRNLGKVGSKCCKHPEAKRMPCAEDYLSVVLNQLCVLHEKTPVSDRVTKCCTESLVNRRPCFSALEVDETYVPKEFNAETFTFHADICTLSEKERQIKKQTALVELVKHKPKATKEQLKAVMDDFAAFVEKCCKADDKETCFAEEGKKLFAASQAALGL

SEQ ID NO: 79 - protein, 585 aa, Artificial Sequence
  HSA R410A
DAHKSEVAHRFKDLGEENFKALVLIAFAQYLQQCPFEDHVKLVNEVTEFAKTCVADESAENCDKSLHTLFGDKLCTVATLRETYGEMADCCAKQEPERNECFLQHKDDNPNLPRLVRPEVDVMCTAFHDNEETFLKKYLYEIARRHPYFYAPELLFFAKRYKAAFTECCQAADKAACLLPKLDELRDEGKASSAKQRLKCASLQKFGERAFKAWAVARLSQRFPKAEFAEVSKLVTDLTKVHTECCHGDLLECADDRADLAKYICENQDSISSKLKECCEKPLLEKSHCIAEVENDEMPADLPSLAADFVESKDVCKNYAEAKDVFLGMFLYEYARRHPDYSVVLLLRLAKTYETTLEKCCAAADPHECYAKVFDEFKPLVEEPQNLIKQNCELFEQLGEYKFQNALLVAYTKKVPQVSTPTLVEVSRNLGKVGSKCCKHPEAKRMPCAEDYLSVVLNQLCVLHEKTPVSDRVTKCCTESLVNRRPCFSALEVDETYVPKEFNAETFTFHADICTLSEKERQIKKQTALVELVKHKPKATKEQLKAVMDDFAAFVEKCCKADDKETCFAEEGKKLVAASQAALGL

SEQ ID NO: 80 - protein, 585 aa, Artificial Sequence
  HSA Y411A
DAHKSEVAHRFKDLGEENFKALVLIAFAQYLQQCPFEDHVKLVNEVTEFAKTCVADESAENCDKSLHTLFGDKLCTVATLRETYGEMADCCAKQEPERNECFLQHKDDNPNLPRLVRPEVDVMCTAFHDNEETFLKKYLYEIARRHPYFYAPELLFFAKRYKAAFTECCQAADKAACLLPKLDELRDEGKASSAKQRLKCASLQKFGERAFKAWAVARLSQRFPKAEFAEVSKLVTDLTKVHTECCHGDLLECADDRADLAKYICENQDSISSKLKECCEKPLLEKSHCIAEVENDEMPADLPSLAADFVESKDVCKNYAEAKDVFLGMFLYEYARRHPDYSVVLLLRLAKTYETTLEKCCAAADPHECYAKVFDEFKPLVEEPQNLIKQNCELFEQLGEYKFQNALLVRATKKVPQVSTPTLVEVSRNLGKVGSKCCKHPEAKRMPCAEDYLSVVLNQLCVLHEKTPVSDRVTKCCTESLVNRRPCFSALEVDETYVPKEFNAETFTFHADICTLSEKERQIKKQTALVELVKHKPKATKEQLKAVMDDFAAFVEKCCKADDKETCFAEEGKKLVAASQAALGL

SEQ ID NO: 81 - protein, 585 aa, Artificial Sequence
  HSA P416A
DAHKSEVAHRFKDLGEENFKALVLIAFAQYLQQCPFEDHVKLVNEVTEFAKTCVADESAENCDKSLHTLFGDKLCTVATLRETYGEMADCCAKQEPERNECFLQHKDDNPNLPRLVRPEVDVMCTAFHDNEETFLKKYLYEIARRHPYFYAPELLFFAKRYKAAFTECCQAADKAACLLPKLDELRDEGKASSAKQRLKCASLQKFGERAFKAWAVARLSQRFPKAEFAEVSKLVTDLTKVHTECCHGDLLECADDRADLAKYICENQDSISSKLKECCEKPLLEKSHCIAEVENDEMPADLPSLAADFVESKDVCKNYAEAKDVFLGMFLYEYARRHPDYSVVLLLRLAKTYETTLEKCCAAADPHECYAKVFDEFKPLVEEPQNLIKQNCELFEQLGEYKFQNALLVRYTKKVAQVSTPTLVEVSRNLGKVGSKCCKHPEAKRMPCAEDYLSVVLNQLCVLHEKTPVSDRVTKCCTESLVNRRPCFSALEVDETYVPKEFNAETFTFHADICTLSEKERQIKKQTALVELVKHKPKATKEQLKAVMDDFAAFVEKCCKADDKETCFAEEGKKLVAASQAALGL

SEQ ID NO: 82 - protein, 585 aa, Artificial Sequence
  HSA E425A
DAHKSEVAHRFKDLGEENFKALVLIAFAQYLQQCPFEDHVKLVNEVTEFAKTCVADESAENCDKSLHTLFGDKLCTVATLRETYGEMADCCAKQEPERNECFLQHKDDNPNLPRLVRPEVDVMCTAFHDNEETFLKKYLYEIARRHPYFYAPELLFFAKRYKAAFTECCQAADKAACLLPKLDELRDEGKASSAKQRLKCASLQKFGERAFKAWAVARLSQRFPKAEFAEVSKLVTDLTKVHTECCHGDLLECADDRADLAKYICENQDSISSKLKECCEKPLLEKSHCIAEVENDEMPADLPSLAADFVESKDVCKNYAEAKDVFLGMFLYEYARRHPDYSVVLLLRLAKTYETTLEKCCAAADPHECYAKVFDEFKPLVEEPQNLIKQNCELFEQLGEYKFQNALLVRYTKKVPQVSTPTLVAVSRNLGKVGSKCCKHPEAKRMPCAEDYLSVVLNQLCVLHEKTPVSDRVTKCCTESLVNRRPCFSALEVDETYVPKEFNAETFTFHADICTLSEKERQIKKQTALVELVKHKPKATKEQLKAVMDDFAAFVEKCCKADDKETCFAEEGKKLVAASQAALGL

SEQ ID NO: 83 - protein, 585 aa, Artificial Sequence
  HSA E425K
DAHKSEVAHRFKDLGEENFKALVLIAFAQYLQQCPFEDHVKLVNEVTEFAKTCVADESAENCDKSLHTLFGDKLCTVATLRETYGEMADCCAKQEPERNECFLQHKDDNPNLPRLVRPEVDVMCTAFHDNEETFLKKYLYEIARRHPYFYAPELLFFAKRYKAAFTECCQAADKAACLLPKLDELRDEGKASSAKQRLKCASLQKFGERAFKAWAVARLSQRFPKAEFAEVSKLVTDLTKVHTECCHGDLLECADDRADLAKYICENQDSISSKLKECCEKPLLEKSHCIAEVENDEMPADLPSLAADFVESKDVCKNYAEAKDVFLGMFLYEYARRHPDYSVVLLLRLAKTYETTLEKCCAAADPHECYAKVFDEFKPLVEEPQNLIKQNCELFEQLGEYKFQNALLVRYTKKVPQVSTPTLVKVSRNLGKVGSKCCKHPEAKRMPCAEDYLSVVLNQLCVLHEKTPVSDRVTKCCTESLVNRRPCFSALEVDETYVPKEFNAETFTFHADICTLSEKERQIKKQTALVELVKHKPKATKEQLKAVMDDFAAFVEKCCKADDKETCFAEEGKKLVAASQAALGL

SEQ ID NO: 84 - protein, 585 aa, Artificial Sequence
  HSA K524A
DAHKSEVAHRFKDLGEENFKALVLIAFAQYLQQCPFEDHVKLVNEVTEFAKTCVADESAENCDKSLHTLFGDKLCTVATLRETYGEMADCCAKQEPERNECFLQHKDDNPNLPRLVRPEVDVMCTAFHDNEETFLKKYLYEIARRHPYFYAPELLFFAKRYKAAFTECCQAADKAACLLPKLDELRDEGKASSAKQRLKCASLQKFGERAFKAWAVARLSQRFPKAEFAEVSKLVTDLTKVHTECCHGDLLECADDRADLAKYICENQDSISSKLKECCEKPLLEKSHCIAEVENDEMPADLPSLAADFVESKDVCKNYAEAKDVFLGMFLYEYARRHPDYSVVLLLRLAKTYETTLEKCCAAADPHECYAKVFDEFKPLVEEPQNLIKQNCELFEQLGEYKFQNALLVRYTKKVPQVSTPTLVEVSRNLGKVGSKCCKHPEAKRMPCAEDYLSVVLNQLCVLHEKTPVSDRVTKCCTESLVNRRPCFSALEVDETYVPKEFNAETFTFHADICTLSEKERQIAKQTALVELVKHKPKATKEQLKAVMDDFAAFVEKCCKADDKETCFAEEGKKLVAASQAALGL

SEQ ID NO: 85 - protein, 585 aa, Artificial Sequence
  HSA K525A
DAHKSEVAHRFKDLGEENFKALVLIAFAQYLQQCPFEDHVKLVNEVTEFAKTCVADESAENCDKSLHTLFGDKLCTVATLRETYGEMADCCAKQEPERNECFLQHKDDNPNLPRLVRPEVDVMCTAFHDNEETFLKKYLYEIARRHPYFYAPELLFFAKRYKAAFTECCQAADKAACLLPKLDELRDEGKASSAKQRLKCASLQKFGERAFKAWAVARLSQRFPKAEFAEVSKLVTDLTKVHTECCHGDLLECADDRADLAKYICENQDSISSKLKECCEKPLLEKSHCIAEVENDEMPADLPSLAADFVESKDVCKNYAEAKDVFLGMFLYEYARRHPDYSVVLLLRLAKTYETTLEKCCAAADPHECYAKVFDEFKPLVEEPQNLIKQNCELFEQLGEYKFQNALLVRYTKKVPQVSTPTLVEVSRNLGKVGSKCCKHPEAKRMPCAEDYLSVVLNQLCVLHEKTPVSDRVTKCCTESLVNRRPCFSALEVDETYVPKEFNAETFTFHADICTLSEKERQIKAQTALVELVKHKPKATKEQLKAVMDDFAAFVEKCCKADDKETCFAEEGKKLVAASQAALGL

SEQ ID NO: 86 - protein, 585 aa, Artificial Sequence
  HSA K534V
DAHKSEVAHRFKDLGEENFKALVLIAFAQYLQQCPFEDHVKLVNEVTEFAKTCVADESAENCDKSLHTLFGDKLCTVATLRETYGEMADCCAKQEPERNECFLQHKDDNPNLPRLVRPEVDVMCTAFHDNEETFLKKYLYEIARRHPYFYAPELLFFAKRYKAAFTECCQAADKAACLLPKLDELRDEGKASSAKQRLKCASLQKFGERAFKAWAVARLSQRFPKAEFAEVSKLVTDLTKVHTECCHGDLLECADDRADLAKYICENQDSISSKLKECCEKPLLEKSHCIAEVENDEMPADLPSLAADFVESKDVCKNYAEAKDVFLGMFLYEYARRHPDYSVVLLLRLAKTYETTLEKCCAAADPHECYAKVFDEFKPLVEEPQNLIKQNCELFEQLGEYKFQNALLVRYTKKVPQVSTPTLVEVSRNLGKVGSKCCKHPEAKRMPCAEDYLSVVLNQLCVLHEKTPVSDRVTKCCTESLVNRRPCFSALEVDETYVPKEFNAETFTFHADICTLSEKERQIKKQTALVELVVHKPKATKEQLKAVMDDFAAFVEKCCKADDKETCFAEEGKKLVAASQAALGL

SEQ ID NO: 87 - protein, 585 aa, Artificial Sequence
  HSA H535F
DAHKSEVAHRFKDLGEENFKALVLIAFAQYLQQCPFEDHVKLVNEVTEFAKTCVADESAENCDKSLHTLFGDKLCTVATLRETYGEMADCCAKQEPERNECFLQHKDDNPNLPRLVRPEVDVMCTAFHDNEETFLKKYLYEIARRHPYFYAPELLFFAKRYKAAFTECCQAADKAACLLPKLDELRDEGKASSAKQRLKCASLQKFGERAFKAWAVARLSQRFPKAEFAEVSKLVTDLTKVHTECCHGDLLECADDRADLAKYICENQDSISSKLKECCEKPLLEKSHCIAEVENDEMPADLPSLAADFVESKDVCKNYAEAKDVFLGMFLYEYARRHPDYSVVLLLRLAKTYETTLEKCCAAADPHECYAKVFDEFKPLVEEPQNLIKQNCELFEQLGEYKFQNALLVRYTKKVPQVSTPTLVEVSRNLGKVGSKCCKHPEAKRMPCAEDYLSVVLNQLCVLHEKTPVSDRVTKCCTESLVNRRPCFSALEVDETYVPKEFNAETFTFHADICTLSEKERQIKKQTALVELVKFKPKATKEQLKAVMDDFAAFVEKCCKADDKETCFAEEGKKLVAASQAALGL

SEQ ID NO: 88 - protein, 585 aa, Artificial Sequence
  HSA N503K
DAHKSEVAHRFKDLGEENFKALVLIAFAQYLQQCPFEDHVKLVNEVTEFAKTCVADESAENCDKSLHTLFGDKLCTVATLRETYGEMADCCAKQEPERNECFLQHKDDNPNLPRLVRPEVDVMCTAFHDNEETFLKKYLYEIARRHPYFYAPELLFFAKRYKAAFTECCQAADKAACLLPKLDELRDEGKASSAKQRLKCASLQKFGERAFKAWAVARLSQRFPKAEFAEVSKLVTDLTKVHTECCHGDLLECADDRADLAKYICENQDSISSKLKECCEKPLLEKSHCIAEVENDEMPADLPSLAADFVESKDVCKNYAEAKDVFLGMFLYEYARRHPDYSVVLLLRLAKTYETTLEKCCAAADPHECYAKVFDEFKPLVEEPQNLIKQNCELFEQLGEYKFQNALLVRYTKKVPQVSTPTLVEVSRNLGKVGSKCCKHPEAKRMPCAEDYLSVVLNQLCVLHEKTPVSDRVTKCCTESLVNRRPCFSALEVDETYVPKEFKAETFTFHADICTLSEKERQIKKQTALVELVKHKPKATKEQLKAVMDDFAAFVEKCCKADDKETCFAEEGKKLVAASQAALGL

SEQ ID NO: 89 - protein, 585 aa, Artificial Sequence
  HSA E505K
DAHKSEVAHRFKDLGEENFKALVLIAFAQYLQQCPFEDHVKLVNEVTEFAKTCVADESAENCDKSLHTLFGDKLCTVATLRETYGEMADCCAKQEPERNECFLQHKDDNPNLPRLVRPEVDVMCTAFHDNEETFLKKYLYEIARRHPYFYAPELLFFAKRYKAAFTECCQAADKAACLLPKLDELRDEGKASSAKQRLKCASLQKFGERAFKAWAVARLSQRFPKAEFAEVSKLVTDLTKVHTECCHGDLLECADDRADLAKYICENQDSISSKLKECCEKPLLEKSHCIAEVENDEMPADLPSLAADFVESKDVCKNYAEAKDVFLGMFLYEYARRHPDYSVVLLLRLAKTYETTLEKCCAAADPHECYAKVFDEFKPLVEEPQNLIKQNCELFEQLGEYKFQNALLVRYTKKVPQVSTPTLVEVSRNLGKVGSKCCKHPEAKRMPCAEDYLSVVLNQLCVLHEKTPVSDRVTKCCTESLVNRRPCFSALEVDETYVPKEFNAKTFTFHADICTLSEKERQIKKQTALVELVKHKPKATKEQLKAVMDDFAAFVEKCCKADDKETCFAEEGKKLVAASQAALGL

SEQ ID NO: 90 - protein, 585 aa, Artificial Sequence
  HSA A569S
DAHKSEVAHRFKDLGEENFKALVLIAFAQYLQQCPFEDHVKLVNEVTEFAKTCVADESAENCDKSLHTLFGDKLCTVATLRETYGEMADCCAKQEPERNECFLQHKDDNPNLPRLVRPEVDVMCTAFHDNEETFLKKYLYEIARRHPYFYAPELLFFAKRYKAAFTECCQAADKAACLLPKLDELRDEGKASSAKQRLKCASLQKFGERAFKAWAVARLSQRFPKAEFAEVSKLVTDLTKVHTECCHGDLLECADDRADLAKYICENQDSISSKLKECCEKPLLEKSHCIAEVENDEMPADLPSLAADFVESKDVCKNYAEAKDVFLGMFLYEYARRHPDYSVVLLLRLAKTYETTLEKCCAAADPHECYAKVFDEFKPLVEEPQNLIKQNCELFEQLGEYKFQNALLVRYTKKVPQVSTPTLVEVSRNLGKVGSKCCKHPEAKRMPCAEDYLSVVLNQLCVLHEKTPVSDRVTKCCTESLVNRRPCFSALEVDETYVPKEFNAETFTFHADICTLSEKERQIKKQTALVELVKHKPKATKEQLKAVMDDFAAFVEKCCKADDKETCFSEEGKKLVAASQAALGL

SEQ ID NO: 91 - protein, 585 aa, Artificial Sequence
  HSA K466A
DAHKSEVAHRFKDLGEENFKALVLIAFAQYLQQCPFEDHVKLVNEVTEFAKTCVADESAENCDKSLHTLFGDKLCTVATLRETYGEMADCCAKQEPERNECFLQHKDDNPNLPRLVRPEVDVMCTAFHDNEETFLKKYLYEIARRHPYFYAPELLFFAKRYKAAFTECCQAADKAACLLPKLDELRDEGKASSAKQRLKCASLQKFGERAFKAWAVARLSQRFPKAEFAEVSKLVTDLTKVHTECCHGDLLECADDRADLAKYICENQDSISSKLKECCEKPLLEKSHCIAEVENDEMPADLPSLAADFVESKDVCKNYAEAKDVFLGMFLYEYARRHPDYSVVLLLRLAKTYETTLEKCCAAADPHECYAKVFDEFKPLVEEPQNLIKQNCELFEQLGEYKFQNALLVRYTKKVPQVSTPTLVEVSRNLGKVGSKCCKHPEAKRMPCAEDYLSVVLNQLCVLHEATPVSDRVTKCCTESLVNRRPCFSALEVDETYVPKEFNAETFTFHADICTLSEKERQIKKQTALVELVKHKPKATKEQLKAVMDDFAAFVEKCCKADDKETCFAEEGKKLVAASQAALGL

SEQ ID NO: 92 - protein, 585 aa, Artificial Sequence
  HSA D471A
DAHKSEVAHRFKDLGEENFKALVLIAFAQYLQQCPFEDHVKLVNEVTEFAKTCVADESAENCDKSLHTLFGDKLCTVATLRETYGEMADCCAKQEPERNECFLQHKDDNPNLPRLVRPEVDVMCTAFHDNEETFLKKYLYEIARRHPYFYAPELLFFAKRYKAAFTECCQAADKAACLLPKLDELRDEGKASSAKQRLKCASLQKFGERAFKAWAVARLSQRFPKAEFAEVSKLVTDLTKVHTECCHGDLLECADDRADLAKYICENQDSISSKLKECCEKPLLEKSHCIAEVENDEMPADLPSLAADFVESKDVCKNYAEAKDVFLGMFLYEYARRHPDYSVVLLLRLAKTYETTLEKCCAAADPHECYAKVFDEFKPLVEEPQNLIKQNCELFEQLGEYKFQNALLVRYTKKVPQVSTPTLVEVSRNLGKVGSKCCKHPEAKRMPCAEDYLSVVLNQLCVLHEKTPVSARVTKCCTESLVNRRPCFSALEVDETYVPKEFNAETFTFHADICTLSEKERQIKKQTALVELVKHKPKATKEQLKAVMDDFAAFVEKCCKADDKETCFAEEGKKLVAASQAALGL

SEQ ID NO: 93 - protein, 585 aa, Artificial Sequence
  HSA R472A
DAHKSEVAHRFKDLGEENFKALVLIAFAQYLQQCPFEDHVKLVNEVTEFAKTCVADESAENCDKSLHTLFGDKLCTVATLRETYGEMADCCAKQEPERNECFLQHKDDNPNLPRLVRPEVDVMCTAFHDNEETFLKKYLYEIARRHPYFYAPELLFFAKRYKAAFTECCQAADKAACLLPKLDELRDEGKASSAKQRLKCASLQKFGERAFKAWAVARLSQRFPKAEFAEVSKLVTDLTKVHTECCHGDLLECADDRADLAKYICENQDSISSKLKECCEKPLLEKSHCIAEVENDEMPADLPSLAADFVESKDVCKNYAEAKDVFLGMFLYEYARRHPDYSVVLLLRLAKTYETTLEKCCAAADPHECYAKVFDEFKPLVEEPQNLIKQNCELFEQLGEYKFQNALLVRYTKKVPQVSTPTLVEVSRNLGKVGSKCCKHPEAKRMPCAEDYLSVVLNQLCVLHEKTPVSDAVTKCCTESLVNRRPCFSALEVDETYVPKEFNAETFTFHADICTLSEKERQIKKQTALVELVKHKPKATKEQLKAVMDDFAAFVEKCCKADDKETCFAEEGKKLVAASQAALGL

SEQ ID NO: 94 - protein, 585 aa, Artificial Sequence
  HSA T527D
DAHKSEVAHRFKDLGEENFKALVLIAFAQYLQQCPFEDHVKLVNEVTEFAKTCVADESAENCDKSLHTLFGDKLCTVATLRETYGEMADCCAKQEPERNECFLQHKDDNPNLPRLVRPEVDVMCTAFHDNEETFLKKYLYEIARRHPYFYAPELLFFAKRYKAAFTECCQAADKAACLLPKLDELRDEGKASSAKQRLKCASLQKFGERAFKAWAVARLSQRFPKAEFAEVSKLVTDLTKVHTECCHGDLLECADDRADLAKYICENQDSISSKLKECCEKPLLEKSHCIAEVENDEMPADLPSLAADFVESKDVCKNYAEAKDVFLGMFLYEYARRHPDYSVVLLLRLAKTYETTLEKCCAAADPHECYAKVFDEFKPLVEEPQNLIKQNCELFEQLGEYKFQNALLVRYTKKVPQVSTPTLVEVSRNLGKVGSKCCKHPEAKRMPCAEDYLSVVLNQLCVLHEKTPVSDRVTKCCTESLVNRRPCFSALEVDETYVPKEFNAETFTFHADICTLSEKERQIKKQDALVELVKHKPKATKEQLKAVMDDFAAFVEKCCKADDKETCFAEEGKKLVAASQAALGL

SEQ ID NO: 95 - protein, 585 aa, Artificial Sequence
  HSA T527M
DAHKSEVAHRFKDLGEENFKALVLIAFAQYLQQCPFEDHVKLVNEVTEFAKTCVADESAENCDKSLHTLFGDKLCTVATLRETYGEMADCCAKQEPERNECFLQHKDDNPNLPRLVRPEVDVMCTAFHDNEETFLKKYLYEIARRHPYFYAPELLFFAKRYKAAFTECCQAADKAACLLPKLDELRDEGKASSAKQRLKCASLQKFGERAFKAWAVARLSQRFPKAEFAEVSKLVTDLTKVHTECCHGDLLECADDRADLAKYICENQDSISSKLKECCEKPLLEKSHCIAEVENDEMPADLPSLAADFVESKDVCKNYAEAKDVFLGMFLYEYARRHPDYSVVLLLRLAKTYETTLEKCCAAADPHECYAKVFDEFKPLVEEPQNLIKQNCELFEQLGEYKFQNALLVRYTKKVPQVSTPTLVEVSRNLGKVGSKCCKHPEAKRMPCAEDYLSVVLNQLCVLHEKTPVSDRVTKCCTESLVNRRPCFSALEVDETYVPKEFNAETFTFHADICTLSEKERQIKKQMALVELVKHKPKATKEQLKAVMDDFAAFVEKCCKADDKETCFAEEGKKLVAASQAALGL

SEQ ID NO: 96 - protein, 585 aa, Artificial Sequence
  HSA T527A
DAHKSEVAHRFKDLGEENFKALVLIAFAQYLQQCPFEDHVKLVNEVTEFAKTCVADESAENCDKSLHTLFGDKLCTVATLRETYGEMADCCAKQEPERNECFLQHKDDNPNLPRLVRPEVDVMCTAFHDNEETFLKKYLYEIARRHPYFYAPELLFFAKRYKAAFTECCQAADKAACLLPKLDELRDEGKASSAKQRLKCASLQKFGERAFKAWAVARLSQRFPKAEFAEVSKLVTDLTKVHTECCHGDLLECADDRADLAKYICENQDSISSKLKECCEKPLLEKSHCIAEVENDEMPADLPSLAADFVESKDVCKNYAEAKDVFLGMFLYEYARRHPDYSVVLLLRLAKTYETTLEKCCAAADPHECYAKVFDEFKPLVEEPQNLIKQNCELFEQLGEYKFQNALLVRYTKKVPQVSTPTLVEVSRNLGKVGSKCCKHPEAKRMPCAEDYLSVVLNQLCVLHEKTPVSDRVTKCCTESLVNRRPCFSALEVDETYVPKEFNAETFTFHADICTLSEKERQIKKQAALVELVKHKPKATKEQLKAVMDDFAAFVEKCCKADDKETCFAEEGKKLVAASQAALGL

SEQ ID NO: 97 - protein, 585 aa, Artificial Sequence
  HSA K190A
DAHKSEVAHRFKDLGEENFKALVLIAFAQYLQQCPFEDHVKLVNEVTEFAKTCVADESAENCDKSLHTLFGDKLCTVATLRETYGEMADCCAKQEPERNECFLQHKDDNPNLPRLVRPEVDVMCTAFHDNEETFLKKYLYEIARRHPYFYAPELLFFAKRYKAAFTECCQAADKAACLLPKLDELRDEGAASSAKQRLKCASLQKFGERAFKAWAVARLSQRFPKAEFAEVSKLVTDLTKVHTECCHGDLLECADDRADLAKYICENQDSISSKLKECCEKPLLEKSHCIAEVENDEMPADLPSLAADFVESKDVCKNYAEAKDVFLGMFLYEYARRHPDYSVVLLLRLAKTYETTLEKCCAAADPHECYAKVFDEFKPLVEEPQNLIKQNCELFEQLGEYKFQNALLVRYTKKVPQVSTPTLVEVSRNLGKVGSKCCKHPEAKRMPCAEDYLSVVLNQLCVLHEKTPVSDRVTKCCTESLVNRRPCFSALEVDETYVPKEFNAETFTFHADICTLSEKERQIKKQTALVELVKHKPKATKEQLKAVMDDFAAFVEKCCKADDKETCFAEEGKKLVAASQAALGL

SEQ ID NO: 98 - protein, 585 aa, Artificial Sequence
  HSA R197A
DAHKSEVAHRFKDLGEENFKALVLIAFAQYLQQCPFEDHVKLVNEVTEFAKTCVADESAENCDKSLHTLFGDKLCTVATLRETYGEMADCCAKQEPERNECFLQHKDDNPNLPRLVRPEVDVMCTAFHDNEETFLKKYLYEIARRHPYFYAPELLFFAKRYKAAFTECCQAADKAACLLPKLDELRDEGKASSAKQALKCASLQKFGERAFKAWAVARLSQRFPKAEFAEVSKLVTDLTKVHTECCHGDLLECADDRADLAKYICENQDSISSKLKECCEKPLLEKSHCIAEVENDEMPADLPSLAADFVESKDVCKNYAEAKDVFLGMFLYEYARRHPDYSVVLLLRLAKTYETTLEKCCAAADPHECYAKVFDEFKPLVEEPQNLIKQNCELFEQLGEYKFQNALLVRYTKKVPQVSTPTLVEVSRNLGKVGSKCCKHPEAKRMPCAEDYLSVVLNQLCVLHEKTPVSDRVTKCCTESLVNRRPCFSALEVDETYVPKEFNAETFTFHADICTLSEKERQIKKQTALVELVKHKPKATKEQLKAVMDDFAAFVEKCCKADDKETCFAEEGKKLVAASQAALGL

SEQ ID NO: 99 - DNA, 27 bp, Artificial Sequence
  Oligonucleotide xAP437
tgagtccgcggaaaattgtgacaaatc

SEQ ID NO: 100 - DNA, 29 bp, Artificial Sequence
  Oligonucleotide xAP438
gcagagctagcagccccttcatcccgaag

SEQ ID NO: 101 - DNA, 38 bp, Artificial Sequence
  Oligonucleotide xAP439
ggaaggctagctctgccaaacaggctctcaagtgtgcc

SEQ ID NO: 102 - DNA, 26 bp, Artificial Sequence
  Oligonucleotide xAP440
gatctccatggcagcattccgtgtgg

SEQ ID NO: 103 - DNA, 29 bp, Artificial Sequence
  Oligonucleotide xAP441
tgctgccatggagatctgctcgagtgtgc

SEQ ID NO: 104 - DNA, 95 bp, Artificial Sequence
  Oligonucleotide xAP442
catttggatcccacttttcctaggtttcttgagacctctacaagagttggagttgacacttggggtactttcttggtgtaagcaactaatagcgc

SEQ ID NO: 105 - DNA, 93 bp, Artificial Sequence
  Oligonucleotide xAP443
catttggatcccacttttcctaggtttcttgagacctctacaagagttggagttgacacttggggtactttcttggtagcacgaactaatagc

SEQ ID NO: 106 - DNA, 76 bp, Artificial Sequence
  Oligonucleotide xAP444
catttggatcccacttttcctaggtttcttgagacctctacaagagttggagttgacacttgagctactttcttgg

SEQ ID NO: 107 - DNA, 50 bp, Artificial Sequence
  Oligonucleotide xAP445
catttggatcccacttttcctaggtttcttgagacagctacaagagttgg

SEQ ID NO: 108 - DNA, 50 bp, Artificial Sequence
  Oligonucleotide xAP446
catttggatcccacttttcctaggtttcttgagacttttacaagagttgg

SEQ ID NO: 109 - DNA, 29 bp, Artificial Sequence
  Oligonucleotide xAP449
agaaacctaggaaaagtgggatccaaatg

SEQ ID NO: 110 - DNA, 98 bp, Artificial Sequence
  Oligonucleotide xAP450
tttcgtcgacttccagagctgaaaagcatggtcgcctgttcaccaaggattctgtgcagcatttggtgactctgtcacttactggcgtagcctcatgc

SEQ ID NO: 111 - DNA, 88 bp, Artificial Sequence
  Oligonucleotide xAP451
gtttcgtcgacttccagagctgaaaagcatggtcgcctgttcaccaaggattctgtgcagcatttggtgactctagcacttactggcg

SEQ ID NO: 112 - DNA, 55 bp, Artificial Sequence
  Oligonucleotide xAP452
ctctggaagtcgacgaaacatacgttcccaaagagtttgatgctgaaacattcac

SEQ ID NO: 113 - DNA, 31 bp, Artificial Sequence
  Oligonucleotide xAP453
tattataagcctaaggcagcttgacttgcag

SEQ ID NO: 114 - DNA, 74 bp, Artificial Sequence
  Oligonucleotide xAP455
ctctggaagtcgacgaaacatacgttcccaaagagtttaatgctgaaacattcaccttcgatgcagatatatgc

SEQ ID NO: 115 - DNA, 74 bp, Artificial Sequence
  Oligonucleotide xAP456
ctctggaagtcgacgaaacatacgttcccaaagagtttaatgctgaaacattcaccttcgaagcagatatatgc

SEQ ID NO: 116 - DNA, 78 bp, Artificial Sequence
  Oligonucleotide xAP457
ctctggaagtcgacgaaacatacgttcccaaagagtttaatgctgaaacattcaccttccatgcagaaatatgcacac

SEQ ID NO: 117 - DNA, 78 bp, Artificial sequence
  Oligonucleotide xAP458
ctctggaagtcgacgaaacatacgttcccaaagagtttaatgctgaaacattcaccttccatgcagctatatgcacac

SEQ ID NO: 118 - DNA, 50 bp, Artificial Sequence
  Oligonucleotide xAP459
ttcacgagctcaacaagtgcagtttgtttagcgatttgtctctccttctc

SEQ ID NO: 119 - DNA, 50 bp, Artificial Sequence
  Oligonucleotide xAP460
ttcacgagctcaacaagtgcagtttgagccttgatttgtctctccttctc

SEQ ID NO: 120 - DNA, 33 bp, Artificial Sequence
  Oligonucleotide xAP461
ttcacgagctcaacaagtgcatcttgtttcttg

SEQ ID NO: 121 - DNA, 29 bp, Artificial Sequence
  Oligonucleotide xAP463
ttgttgagctcgtggttcacaagcccaag

SEQ ID NO: 122 - DNA, 30 bp, Artificial Sequence
  Oligonucleotide xAP471
ttgttgagctcgtgaaatttaagcccaagg

SEQ ID NO: 123 - DNA, 27 bp, Artificial Sequence
  Oligonucleotide xAP472
ctggaagtcgacgaaacatacgttccc

SEQ ID NO: 124 - DNA, 75 bp, Artificial Sequence
  Oligonucleotide xAP473
ataagcctaaggcagcttgacttgcagcaacaagttttttaccctcctcggcaaagcaggtaaccttatcgtcag

SEQ ID NO: 125 - DNA, 62 bp, Artificial Sequence
  Oligonucleotide xAP481
ataagcctaaggcagcttgacttgcagcaacaagttttttaccctcctcaacaaagcaggtc

SEQ ID NO: 126 - DNA, 62 bp, Artificial Sequence
  Oligonucleotide xAP482
ataagcctaaggcagcttgacttgcagcaacaagttttttaccctcctccaaaaagcaggtc

SEQ ID NO: 127 - DNA, 43 bp, Artificial Sequence
  Oligonucleotide xAP489
ataagcctaaggcagcttgacttgcagcaaaaagttttttacc

SEQ ID NO: 128 - DNA, 85 bp, Artificial Sequence
  Oligonucleotide xAP490
gtttcgtcgacttccagagctgaaaagcatggtcgcctgttcaccaaggattctgtgcagcatttggtgacagcgtcacttactg

SEQ ID NO: 129 - DNA, 53 bp, Artificial Sequence
  Oligonucleotide xAP491
tggaagtcgacgaaacatacgttcccaaagagtttaatgctcaaacattcacc

SEQ ID NO: 130 - DNA, 60 bp, Artificial Sequence
  Oligonucleotide xAP492
tggaagtcgacgaaacatacgttcccaaagagtttaatgctaaaacattcaccttccatg

SEQ ID NO: 131 - DNA, 60 bp, Artificial Sequence
  Oligonucleotide xAP493
tggaagtcgacgaaacatacgttcccaaagagtttaaagctgaaacattcaccttccatg

SEQ ID NO: 132 - DNA, 70 bp, Artificial Sequence
  Oligonucleotide xAP494
ataagcctaaggcagcttgacttgcagcaacaagttttttaccctcctcagaaaagcaggtctccttatc

SEQ ID NO: 133 - DNA, 50 bp, Artificial Sequence
  Oligonucleotide xAP495
gtttcacgagctcaacaagtgccatttgtttcttgatttgtctctccttc

SEQ ID NO: 134 - DNA, 50 bp, Artificial sequence
  Oligonucleotide xAP496
gtttcacgagctcaacaagtgcagcttgtttcttgatttgtctctccttc

SEQ ID NO: 135 - protein, 585 aa, Artificial Sequence
  HSA E425A, K573P
DAHKSEVAHRFKDLGEENFKALVLIAFAQYLQQCPFEDHVKLVNEVTEFAKTCVADESAENCDKSLHTLFGDKLCTVATLRETYGEMADCCAKQEPERNECFLQHKDDNPNLPRLVRPEVDVMCTAFHDNEETFLKKYLYEIARRHPYFYAPELLFFAKRYKAAFTECCQAADKAACLLPKLDELRDEGKASSAKQRLKCASLQKFGERAFKAWAVARLSQRFPKAEFAEVSKLVTDLTKVHTECCHGDLLECADDRADLAKYICENQDSISSKLKECCEKPLLEKSHCIAEVENDEMPADLPSLAADFVESKDVCKNYAEAKDVFLGMFLYEYARRHPDYSVVLLLRLAKTYETTLEKCCAAADPHECYAKVFDEFKPLVEEPQNLIKQNCELFEQLGEYKFQNALLVRYTKKVPQVSTPTLVAVSRNLGKVGSKCCKHPEAKRMPCAEDYLSVVLNQLCVLHEKTPVSDRVTKCCTESLVNRRPCFSALEVDETYVPKEFNAETFTFHADICTLSEKERQIKKQTALVELVKHKPKATKEQLKAVMDDFAAFVEKCCKADDKETCFAEEGPKLVAASQAALGL

SEQ ID NO: 136 - protein, 585 aa, Artificial Sequence
  HSA T527M, K573P
DAHKSEVAHRFKDLGEENFKALVLIAFAQYLQQCPFEDHVKLVNEVTEFAKTCVADESAENCDKSLHTLFGDKLCTVATLRETYGEMADCCAKQEPERNECFLQHKDDNPNLPRLVRPEVDVMCTAFHDNEETFLKKYLYEIARRHPYFYAPELLFFAKRYKAAFTECCQAADKAACLLPKLDELRDEGKASSAKQRLKCASLQKFGERAFKAWAVARLSQRFPKAEFAEVSKLVTDLTKVHTECCHGDLLECADDRADLAKYICENQDSISSKLKECCEKPLLEKSHCIAEVENDEMPADLPSLAADFVESKDVCKNYAEAKDVFLGMFLYEYARRHPDYSVVLLLRLAKTYETTLEKCCAAADPHECYAKVFDEFKPLVEEPQNLIKQNCELFEQLGEYKFQNALLVRYTKKVPQVSTPTLVEVSRNLGKVGSKCCKHPEAKRMPCAEDYLSVVLNQLCVLHEKTPVSDRVTKCCTESLVNRRPCFSALEVDETYVPKEFNAETFTFHADICTLSEKERQIKKQMALVELVKHKPKATKEQLKAVMDDFAAFVEKCCKADDKETCFAEEGPKLVAASQAALGL

SEQ ID NO: 137 - protein, 585 aa, Artificial Sequence
  HSA E505Q, K573P
DAHKSEVAHRFKDLGEENFKALVLIAFAQYLQQCPFEDHVKLVNEVTEFAKTCVADESAENCDKSLHTLFGDKLCTVATLRETYGEMADCCAKQEPERNECFLQHKDDNPNLPRLVRPEVDVMCTAFHDNEETFLKKYLYEIARRHPYFYAPELLFFAKRYKAAFTECCQAADKAACLLPKLDELRDEGKASSAKQRLKCASLQKFGERAFKAWAVARLSQRFPKAEFAEVSKLVTDLTKVHTECCHGDLLECADDRADLAKYICENQDSISSKLKECCEKPLLEKSHCIAEVENDEMPADLPSLAADFVESKDVCKNYAEAKDVFLGMFLYEYARRHPDYSVVLLLRLAKTYETTLEKCCAAADPHECYAKVFDEFKPLVEEPQNLIKQNCELFEQLGEYKFQNALLVRYTKKVPQVSTPTLVEVSRNLGKVGSKCCKHPEAKRMPCAEDYLSVVLNQLCVLHEKTPVSDRVTKCCTESLVNRRPCFSALEVDETYVPKEFNAQTFTFHADICTLSEKERQIKKQTALVELVKHKPKATKEQLKAVMDDFAAFVEKCCKADDKETCFAEEGPKLVAASQAALGL

SEQ ID NO: 138 - protein, 585 aa, Artificial Sequence
  HSA N111D, K573P
DAHKSEVAHRFKDLGEENFKALVLIAFAQYLQQCPFEDHVKLVNEVTEFAKTCVADESAENCDKSLHTLFGDKLCTVATLRETYGEMADCCAKQEPERNECFLQHKDDNPDLPRLVRPEVDVMCTAFHDNEETFLKKYLYEIARRHPYFYAPELLFFAKRYKAAFTECCQAADKAACLLPKLDELRDEGKASSAKQRLKCASLQKFGERAFKAWAVARLSQRFPKAEFAEVSKLVTDLTKVHTECCHGDLLECADDRADLAKYICENQDSISSKLKECCEKPLLEKSHCIAEVENDEMPADLPSLAADFVESKDVCKNYAEAKDVFLGMFLYEYARRHPDYSVVLLLRLAKTYETTLEKCCAAADPHECYAKVFDEFKPLVEEPQNLIKQNCELFEQLGEYKFQNALLVRYTKKVPQVSTPTLVEVSRNLGKVGSKCCKHPEAKRMPCAEDYLSVVLNQLCVLHEKTPVSDRVTKCCTESLVNRRPCFSALEVDETYVPKEFNAETFTFHADICTLSEKERQIKKQTALVELVKHKPKATKEQLKAVMDDFAAFVEKCCKADDKETCFAEEGPKLVAASQAALGL

SEQ ID NO: 139 - protein, 585 aa, Artificial Sequence
  HSA N111G, K573P
DAHKSEVAHRFKDLGEENFKALVLIAFAQYLQQCPFEDHVKLVNEVTEFAKTCVADESAENCDKSLHTLFGDKLCTVATLRETYGEMADCCAKQEPERNECFLQHKDDNPGLPRLVRPEVDVMCTAFHDNEETFLKKYLYEIARRHPYFYAPELLFFAKRYKAAFTECCQAADKAACLLPKLDELRDEGKASSAKQRLKCASLQKFGERAFKAWAVARLSQRFPKAEFAEVSKLVTDLTKVHTECCHGDLLECADDRADLAKYICENQDSISSKLKECCEKPLLEKSHCIAEVENDEMPADLPSLAADFVESKDVCKNYAEAKDVFLGMFLYEYARRHPDYSVVLLLRLAKTYETTLEKCCAAADPHECYAKVFDEFKPLVEEPQNLIKQNCELFEQLGEYKFQNALLVRYTKKVPQVSTPTLVEVSRNLGKVGSKCCKHPEAKRMPCAEDYLSVVLNQLCVLHEKTPVSDRVTKCCTESLVNRRPCFSALEVDETYVPKEFNAETFTFHADICTLSEKERQIKKQTALVELVKHKPKATKEQLKAVMDDFAAFVEKCCKADDKETCFAEEGPKLVAASQAALGL

SEQ ID NO: 140 - protein, 585 aa, Artificial Sequence
  HSA N111H, K573P
DAHKSEVAHRFKDLGEENFKALVLIAFAQYLQQCPFEDHVKLVNEVTEFAKTCVADESAENCDKSLHTLFGDKLCTVATLRETYGEMADCCAKQEPERNECFLQHKDDNPHLPRLVRPEVDVMCTAFHDNEETFLKKYLYEIARRHPYFYAPELLFFAKRYKAAFTECCQAADKAACLLPKLDELRDEGKASSAKQRLKCASLQKFGERAFKAWAVARLSQRFPKAEFAEVSKLVTDLTKVHTECCHGDLLECADDRADLAKYICENQDSISSKLKECCEKPLLEKSHCIAEVENDEMPADLPSLAADFVESKDVCKNYAEAKDVFLGMFLYEYARRHPDYSVVLLLRLAKTYETTLEKCCAAADPHECYAKVFDEFKPLVEEPQNLIKQNCELFEQLGEYKFQNALLVRYTKKVPQVSTPTLVEVSRNLGKVGSKCCKHPEAKRMPCAEDYLSVVLNQLCVLHEKTPVSDRVTKCCTESLVNRRPCFSALEVDETYVPKEFNAETFTFHADICTLSEKERQIKKQTALVELVKHKPKATKEQLKAVMDDFAAFVEKCCKADDKETCFAEEGPKLVAASQAALGL

SEQ ID NO: 141 - protein, 585 aa, Artificial Sequence
  HSA N111R, K573P
DAHKSEVAHRFKDLGEENFKALVLIAFAQYLQQCPFEDHVKLVNEVTEFAKTCVADESAENCDKSLHTLFGDKLCTVATLRETYGEMADCCAKQEPERNECFLQHKDDNPRLPRLVRPEVDVMCTAFHDNEETFLKKYLYEIARRHPYFYAPELLFFAKRYKAAFTECCQAADKAACLLPKLDELRDEGKASSAKQRLKCASLQKFGERAFKAWAVARLSQRFPKAEFAEVSKLVTDLTKVHTECCHGDLLECADDRADLAKYICENQDSISSKLKECCEKPLLEKSHCIAEVENDEMPADLPSLAADFVESKDVCKNYAEAKDVFLGMFLYEYARRHPDYSVVLLLRLAKTYETTLEKCCAAADPHECYAKVFDEFKPLVEEPQNLIKQNCELFEQLGEYKFQNALLVRYTKKVPQVSTPTLVEVSRNLGKVGSKCCKHPEAKRMPCAEDYLSVVLNQLCVLHEKTPVSDRVTKCCTESLVNRRPCFSALEVDETYVPKEFNAETFTFHADICTLSEKERQIKKQTALVELVKHKPKATKEQLKAVMDDFAAFVEKCCKADDKETCFAEEGPKLVAASQAALGL

SEQ ID NO: 142 - protein, 585 aa, Artificial Sequence
  HSA N111Q, K573P
DAHKSEVAHRFKDLGEENFKALVLIAFAQYLQQCPFEDHVKLVNEVTEFAKTCVADESAENCDKSLHTLFGDKLCTVATLRETYGEMADCCAKQEPERNECFLQHKDDNPQLPRLVRPEVDVMCTAFHDNEETFLKKYLYEIARRHPYFYAPELLFFAKRYKAAFTECCQAADKAACLLPKLDELRDEGKASSAKQRLKCASLQKFGERAFKAWAVARLSQRFPKAEFAEVSKLVTDLTKVHTECCHGDLLECADDRADLAKYICENQDSISSKLKECCEKPLLEKSHCIAEVENDEMPADLPSLAADFVESKDVCKNYAEAKDVFLGMFLYEYARRHPDYSVVLLLRLAKTYETTLEKCCAAADPHECYAKVFDEFKPLVEEPQNLIKQNCELFEQLGEYKFQNALLVRYTKKVPQVSTPTLVEVSRNLGKVGSKCCKHPEAKRMPCAEDYLSVVLNQLCVLHEKTPVSDRVTKCCTESLVNRRPCFSALEVDETYVPKEFNAETFTFHADICTLSEKERQIKKQTALVELVKHKPKATKEQLKAVMDDFAAFVEKCCKADDKETCFAEEGPKLVAASQAALGL

SEQ ID NO: 143 - protein, 585 aa, Artificial Sequence
  HSA N111E, K573P
DAHKSEVAHRFKDLGEENFKALVLIAFAQYLQQCPFEDHVKLVNEVTEFAKTCVADESAENCDKSLHTLFGDKLCTVATLRETYGEMADCCAKQEPERNECFLQHKDDNPELPRLVRPEVDVMCTAFHDNEETFLKKYLYEIARRHPYFYAPELLFFAKRYKAAFTECCQAADKAACLLPKLDELRDEGKASSAKQRLKCASLQKFGERAFKAWAVARLSQRFPKAEFAEVSKLVTDLTKVHTECCHGDLLECADDRADLAKYICENQDSISSKLKECCEKPLLEKSHCIAEVENDEMPADLPSLAADFVESKDVCKNYAEAKDVFLGMFLYEYARRHPDYSVVLLLRLAKTYETTLEKCCAAADPHECYAKVFDEFKPLVEEPQNLIKQNCELFEQLGEYKFQNALLVRYTKKVPQVSTPTLVEVSRNLGKVGSKCCKHPEAKRMPCAEDYLSVVLNQLCVLHEKTPVSDRVTKCCTESLVNRRPCFSALEVDETYVPKEFNAETFTFHADICTLSEKERQIKKQTALVELVKHKPKATKEQLKAVMDDFAAFVEKCCKADDKETCFAEEGPKLVAASQAALGL

SEQ ID NO: 144 - protein, 585 aa, Artificial Sequence
  HSA K534V, K573P
DAHKSEVAHRFKDLGEENFKALVLIAFAQYLQQCPFEDHVKLVNEVTEFAKTCVADESAENCDKSLHTLFGDKLCTVATLRETYGEMADCCAKQEPERNECFLQHKDDNPNLPRLVRPEVDVMCTAFHDNEETFLKKYLYEIARRHPYFYAPELLFFAKRYKAAFTECCQAADKAACLLPKLDELRDEGKASSAKQRLKCASLQKFGERAFKAWAVARLSQRFPKAEFAEVSKLVTDLTKVHTECCHGDLLECADDRADLAKYICENQDSISSKLKECCEKPLLEKSHCIAEVENDEMPADLPSLAADFVESKDVCKNYAEAKDVFLGMFLYEYARRHPDYSVVLLLRLAKTYETTLEKCCAAADPHECYAKVFDEFKPLVEEPQNLIKQNCELFEQLGEYKFQNALLVRYTKKVPQVSTPTLVEVSRNLGKVGSKCCKHPEAKRMPCAEDYLSVVLNQLCVLHEKTPVSDRVTKCCTESLVNRRPCFSALEVDETYVPKEFNAETFTFHADICTLSEKERQIKKQTALVELVVHKPKATKEQLKAVMDDFAAFVEKCCKADDKETCFAEEGPKLVAASQAALGL

SEQ ID NO: 145 - protein, 387 aa, Artificial sequence
  HSA domain 1 and domain 2
DAHKSEVAHRFKDLGEENFKALVLIAFAQYLQQCPFEDHVKLVNEVTEFAKTCVADESAENCDKSLHTLFGDKLCTVATLRETYGEMADCCAKQEPERNECFLQHKDDNPNLPRLVRPEVDVMCTAFHDNEETFLKKYLYEIARRHPYFYAPELLFFAKRYKAAFTECCQAADKAACLLPKLDELRDEGKASSAKQRLKCASLQKFGERAFKAWAVARLSQRFPKAEFAEVSKLVTDLTKVHTECCHGDLLECADDRADLAKYICENQDSISSKLKECCEKPLLEKSHCIAEVENDEMPADLPSLAADFVESKDVCKNYAEAKDVFLGMFLYEYARRHPDYSVVLLLRLAKTYETTLEKCCAAADPHECYAKVFDEFKPLVEEPQNL

SEQ ID NO: 146 - protein, 585 aa, Artificial Sequence
  HSA Q417A
DAHKSEVAHRFKDLGEENFKALVLIAFAQYLQQCPFEDHVKLVNEVTEFAKTCVADESAENCDKSLHTLFGDKLCTVATLRETYGEMADCCAKQEPERNECFLQHKDDNPNLPRLVRPEVDVMCTAFHDNEETFLKKYLYEIARRHPYFYAPELLFFAKRYKAAFTECCQAADKAACLLPKLDELRDEGKASSAKQRLKCASLQKFGERAFKAWAVARLSQRFPKAEFAEVSKLVTDLTKVHTECCHGDLLECADDRADLAKYICENQDSISSKLKECCEKPLLEKSHCIAEVENDEMPADLPSLAADFVESKDVCKNYAEAKDVFLGMFLYEYARRHPDYSVVLLLRLAKTYETTLEKCCAAADPHECYAKVFDEFKPLVEEPQNLIKQNCELFEQLGEYKFQNALLVRYTKKVPAVSTPTLVEVSRNLGKVGSKCCKHPEAKRMPCAEDYLSVVLNQLCVLHEKTPVSDRVTKCCTESLVNRRPCFSALEVDETYVPKEFNAETFTFHADICTLSEKERQIKKQTALVELVKHKPKATKEQLKAVMDDFAAFVEKCCKADDKETCFAEEGKKLVAASQAALGL

SEQ ID NO: 147 - protein, 585 aa, Artificial Sequence
  HSA H440Q
DAHKSEVAHRFKDLGEENFKALVLIAFAQYLQQCPFEDHVKLVNEVTEFAKTCVADESAENCDKSLHTLFGDKLCTVATLRETYGEMADCCAKQEPERNECFLQHKDDNPNLPRLVRPEVDVMCTAFHDNEETFLKKYLYEIARRHPYFYAPELLFFAKRYKAAFTECCQAADKAACLLPKLDELRDEGKASSAKQRLKCASLQKFGERAFKAWAVARLSQRFPKAEFAEVSKLVTDLTKVHTECCHGDLLECADDRADLAKYICENQDSISSKLKECCEKPLLEKSHCIAEVENDEMPADLPSLAADFVESKDVCKNYAEAKDVFLGMFLYEYARRHPDYSVVLLLRLAKTYETTLEKCCAAADPHECYAKVFDEFKPLVEEPQNLIKQNCELFEQLGEYKFQNALLVRYTKKVPQVSTPTLVEVSRNLGKVGSKCCKQPEAKRMPCAEDYLSVVLNQLCVLHEKTPVSDRVTKCCTESLVNRRPCFSALEVDETYVPKEFNAETFTFHADICTLSEKERQIKKQTALVELVKHKPKATKEQLKAVMDDFAAFVEKCCKADDKETCFAEEGKKLVAASQAALGL

SEQ ID NO: 148 - protein, 585 aa, Artificial Sequence
  HSA H464Q
DAHKSEVAHRFKDLGEENFKALVLIAFAQYLQQCPFEDHVKLVNEVTEFAKTCVADESAENCDKSLHTLFGDKLCTVATLRETYGEMADCCAKQEPERNECFLQHKDDNPNLPRLVRPEVDVMCTAFHDNEETFLKKYLYEIARRHPYFYAPELLFFAKRYKAAFTECCQAADKAACLLPKLDELRDEGKASSAKQRLKCASLQKFGERAFKAWAVARLSQRFPKAEFAEVSKLVTDLTKVHTECCHGDLLECADDRADLAKYICENQDSISSKLKECCEKPLLEKSHCIAEVENDEMPADLPSLAADFVESKDVCKNYAEAKDVFLGMFLYEYARRHPDYSVVLLLRLAKTYETTLEKCCAAADPHECYAKVFDEFKPLVEEPQNLIKQNCELFEQLGEYKFQNALLVRYTKKVPQVSTPTLVEVSRNLGKVGSKCCKHPEAKRMPCAEDYLSVVLNQLCVLQEKTPVSDRVTKCCTESLVNRRPCFSALEVDETYVPKEFNAETFTFHADICTLSEKERQIKKQTALVELVKHKPKATKEQLKAVMDDFAAFVEKCCKADDKETCFAEEGKKLVAASQAALGL

SEQ ID NO: 149 - protein, 585 aa, Artificial Sequence
  HSA D494N (Casebrook)
DAHKSEVAHRFKDLGEENFKALVLIAFAQYLQQCPFEDHVKLVNEVTEFAKTCVADESAENCDKSLHTLFGDKLCTVATLRETYGEMADCCAKQEPERNECFLQHKDDNPNLPRLVRPEVDVMCTAFHDNEETFLKKYLYEIARRHPYFYAPELLFFAKRYKAAFTECCQAADKAACLLPKLDELRDEGKASSAKQRLKCASLQKFGERAFKAWAVARLSQRFPKAEFAEVSKLVTDLTKVHTECCHGDLLECADDRADLAKYICENQDSISSKLKECCEKPLLEKSHCIAEVENDEMPADLPSLAADFVESKDVCKNYAEAKDVFLGMFLYEYARRHPDYSVVLLLRLAKTYETTLEKCCAAADPHECYAKVFDEFKPLVEEPQNLIKQNCELFEQLGEYKFQNALLVRYTKKVPQVSTPTLVEVSRNLGKVGSKCCKHPEAKRMPCAEDYLSVVLNQLCVLHEKTPVSDRVTKCCTESLVNRRPCFSALEVNETYVPKEFNAETFTFHADICTLSEKERQIKKQTALVELVKHKPKATKEQLKAVMDDFAAFVEKCCKADDKETCFAEEGKKLVAASQAALGL

SEQ ID NO: 150 - protein, 584 aa, Artificial Sequence
  HSA D494A
DAHKSEVAHRFKDLGEENFKALVLIAFAQYLQQCPFEDHVKLVNEVTEFAKTCVADESAENCDKSLHTLFGDKLCTVATLRETYGEMADCCAKQEPERNECFLQHKDDNPNLPRLVRPEVDVMCTAFHDNEETFLKKYLYEIARRHPYFYAPELLFFAKRYKAAFTECCQAADKAACLLPKLDELRDEGKASSAKQRLKCASLQKFGERAFKAWAVARLSQRFPKAEFAEVSKLVTDLTKVHTECCHGDLLECADDRADLAKYICENQDSISSKLKECCEKPLLEKSHCIAEVENDEMPADLPSLAADFVESKDVCKNYAEAKDVFLGMFLYEYARRHPDYSVVLLLRLAKTYETTLEKCCAAADPHECYAKVFDEFKPLVEEPQNLIKQNCELFEQLGEYKFQNALLVRYTKKVPQVSTPTLVEVSRNLGKVGSKCCKHPEAKRMPCAEDYLSVVLNQLCVLHEKTPVSDRVTKCCTESLVNRRPCFSALEVAETYVPKEFNAETFTFHADICTLSEKERQIKKQTALVELVKHKPKATKEQLKAVMDDFAAFVEKCCKADDKETCFAEEGKKLVAASQAALG

SEQ ID NO: 151 - protein, 585 aa, Artificial Sequence
  HSA D494Q
DAHKSEVAHRFKDLGEENFKALVLIAFAQYLQQCPFEDHVKLVNEVTEFAKTCVADESAENCDKSLHTLFGDKLCTVATLRETYGEMADCCAKQEPERNECFLQHKDDNPNLPRLVRPEVDVMCTAFHDNEETFLKKYLYEIARRHPYFYAPELLFFAKRYKAAFTECCQAADKAACLLPKLDELRDEGKASSAKQRLKCASLQKFGERAFKAWAVARLSQRFPKAEFAEVSKLVTDLTKVHTECCHGDLLECADDRADLAKYICENQDSISSKLKECCEKPLLEKSHCIAEVENDEMPADLPSLAADFVESKDVCKNYAEAKDVFLGMFLYEYARRHPDYSVVLLLRLAKTYETTLEKCCAAADPHECYAKVFDEFKPLVEEPQNLIKQNCELFEQLGEYKFQNALLVRYTKKVPQVSTPTLVEVSRNLGKVGSKCCKHPEAKRMPCAEDYLSVVLNQLCVLHEKTPVSDRVTKCCTESLVNRRPCFSALEVQETYVPKEFNAETFTFHADICTLSEKERQIKKQTALVELVKHKPKATKEQLKAVMDDFAAFVEKCCKADDKETCFAEEGKKLVAASQAALGL

SEQ ID NO: 152 - protein, 585 aa, Artificial Sequence
  HSA E495Q
DAHKSEVAHRFKDLGEENFKALVLIAFAQYLQQCPFEDHVKLVNEVTEFAKTCVADESAENCDKSLHTLFGDKLCTVATLRETYGEMADCCAKQEPERNECFLQHKDDNPNLPRLVRPEVDVMCTAFHDNEETFLKKYLYEIARRHPYFYAPELLFFAKRYKAAFTECCQAADKAACLLPKLDELRDEGKASSAKQRLKCASLQKFGERAFKAWAVARLSQRFPKAEFAEVSKLVTDLTKVHTECCHGDLLECADDRADLAKYICENQDSISSKLKECCEKPLLEKSHCIAEVENDEMPADLPSLAADFVESKDVCKNYAEAKDVFLGMFLYEYARRHPDYSVVLLLRLAKTYETTLEKCCAAADPHECYAKVFDEFKPLVEEPQNLIKQNCELFEQLGEYKFQNALLVRYTKKVPQVSTPTLVEVSRNLGKVGSKCCKHPEAKRMPCAEDYLSVVLNQLCVLHEKTPVSDRVTKCCTESLVNRRPCFSALEVDQTYVPKEFNAETFTFHADICTLSEKERQIKKQTALVELVKHKPKATKEQLKAVMDDFAAFVEKCCKADDKETCFAEEGKKLVAASQAALGL

SEQ ID NO: 153 - protein, 585 aa, Artificial Sequence
  HSA E495A
DAHKSEVAHRFKDLGEENFKALVLIAFAQYLQQCPFEDHVKLVNEVTEFAKTCVADESAENCDKSLHTLFGDKLCTVATLRETYGEMADCCAKQEPERNECFLQHKDDNPNLPRLVRPEVDVMCTAFHDNEETFLKKYLYEIARRHPYFYAPELLFFAKRYKAAFTECCQAADKAACLLPKLDELRDEGKASSAKQRLKCASLQKFGERAFKAWAVARLSQRFPKAEFAEVSKLVTDLTKVHTECCHGDLLECADDRADLAKYICENQDSISSKLKECCEKPLLEKSHCIAEVENDEMPADLPSLAADFVESKDVCKNYAEAKDVFLGMFLYEYARRHPDYSVVLLLRLAKTYETTLEKCCAAADPHECYAKVFDEFKPLVEEPQNLIKQNCELFEQLGEYKFQNALLVRYTKKVPQVSTPTLVEVSRNLGKVGSKCCKHPEAKRMPCAEDYLSVVLNQLCVLHEKTPVSDRVTKCCTESLVNRRPCFSALEVDATYVPKEFNAETFTFHADICTLSEKERQIKKQTALVELVKHKPKATKEQLKAVMDDFAAFVEKCCKADDKETCFAEEGKKLVAASQAALGL

SEQ ID NO: 154 - protein, 585 aa, Artificial Sequence
  HSA T496A
DAHKSEVAHRFKDLGEENFKALVLIAFAQYLQQCPFEDHVKLVNEVTEFAKTCVADESAENCDKSLHTLFGDKLCTVATLRETYGEMADCCAKQEPERNECFLQHKDDNPNLPRLVRPEVDVMCTAFHDNEETFLKKYLYEIARRHPYFYAPELLFFAKRYKAAFTECCQAADKAACLLPKLDELRDEGKASSAKQRLKCASLQKFGERAFKAWAVARLSQRFPKAEFAEVSKLVTDLTKVHTECCHGDLLECADDRADLAKYICENQDSISSKLKECCEKPLLEKSHCIAEVENDEMPADLPSLAADFVESKDVCKNYAEAKDVFLGMFLYEYARRHPDYSVVLLLRLAKTYETTLEKCCAAADPHECYAKVFDEFKPLVEEPQNLIKQNCELFEQLGEYKFQNALLVRYTKKVPQVSTPTLVEVSRNLGKVGSKCCKHPEAKRMPCAEDYLSVVLNQLCVLHEKTPVSDRVTKCCTESLVNRRPCFSALEVDEAYVPKEFNAETFTFHADICTLSEKERQIKKQTALVELVKHKPKATKEQLKAVMDDFAAFVEKCCKADDKETCFAEEGKKLVAASQAALGL

SEQ ID NO: 155 - protein, 585 aa, Artificial Sequence
  HSA D494N, T496A
DAHKSEVAHRFKDLGEENFKALVLIAFAQYLQQCPFEDHVKLVNEVTEFAKTCVADESAENCDKSLHTLFGDKLCTVATLRETYGEMADCCAKQEPERNECFLQHKDDNPNLPRLVRPEVDVMCTAFHDNEETFLKKYLYEIARRHPYFYAPELLFFAKRYKAAFTECCQAADKAACLLPKLDELRDEGKASSAKQRLKCASLQKFGERAFKAWAVARLSQRFPKAEFAEVSKLVTDLTKVHTECCHGDLLECADDRADLAKYICENQDSISSKLKECCEKPLLEKSHCIAEVENDEMPADLPSLAADFVESKDVCKNYAEAKDVFLGMFLYEYARRHPDYSVVLLLRLAKTYETTLEKCCAAADPHECYAKVFDEFKPLVEEPQNLIKQNCELFEQLGEYKFQNALLVRYTKKVPQVSTPTLVEVSRNLGKVGSKCCKHPEAKRMPCAEDYLSVVLNQLCVLHEKTPVSDRVTKCCTESLVNRRPCFSALEVNEAYVPKEFNAETFTFHADICTLSEKERQIKKQTALVELVKHKPKATKEQLKAVMDDFAAFVEKCCKADDKETCFAEEGKKLVAASQAALGL

SEQ ID NO: 156 - protein, 585 aa, Artificial Sequence
  HSA HSA T83N
DAHKSEVAHRFKDLGEENFKALVLIAFAQYLQQCPFEDHVKLVNEVTEFAKTCVADESAENCDKSLHTLFGDKLCTVATLRENYGEMADCCAKQEPERNECFLQHKDDNPNLPRLVRPEVDVMCTAFHDNEETFLKKYLYEIARRHPYFYAPELLFFAKRYKAAFTECCQAADKAACLLPKLDELRDEGKASSAKQRLKCASLQKFGERAFKAWAVARLSQRFPKAEFAEVSKLVTDLTKVHTECCHGDLLECADDRADLAKYICENQDSISSKLKECCEKPLLEKSHCIAEVENDEMPADLPSLAADFVESKDVCKNYAEAKDVFLGMFLYEYARRHPDYSVVLLLRLAKTYETTLEKCCAAADPHECYAKVFDEFKPLVEEPQNLIKQNCELFEQLGEYKFQNALLVRYTKKVPQVSTPTLVEVSRNLGKVGSKCCKHPEAKRMPCAEDYLSVVLNQLCVLHEKTPVSDRVTKCCTESLVNRRPCFSALEVDETYVPKEFNAETFTFHADICTLSEKERQIKKQTALVELVKHKPKATKEQLKAVMDDFAAFVEKCCKADDKETCFAEEGKKLVAASQAALGL

SEQ ID NO: 157 - protein, 585 aa, Artificial Sequence
  HSA P499A
DAHKSEVAHRFKDLGEENFKALVLIAFAQYLQQCPFEDHVKLVNEVTEFAKTCVADESAENCDKSLHTLFGDKLCTVATLRETYGEMADCCAKQEPERNECFLQHKDDNPNLPRLVRPEVDVMCTAFHDNEETFLKKYLYEIARRHPYFYAPELLFFAKRYKAAFTECCQAADKAACLLPKLDELRDEGKASSAKQRLKCASLQKFGERAFKAWAVARLSQRFPKAEFAEVSKLVTDLTKVHTECCHGDLLECADDRADLAKYICENQDSISSKLKECCEKPLLEKSHCIAEVENDEMPADLPSLAADFVESKDVCKNYAEAKDVFLGMFLYEYARRHPDYSVVLLLRLAKTYETTLEKCCAAADPHECYAKVFDEFKPLVEEPQNLIKQNCELFEQLGEYKFQNALLVRYTKKVPQVSTPTLVEVSRNLGKVGSKCCKHPEAKRMPCAEDYLSVVLNQLCVLHEKTPVSDRVTKCCTESLVNRRPCFSALEVDETYVAKEFNAETFTFHADICTLSEKERQIKKQTALVELVKHKPKATKEQLKAVMDDFAAFVEKCCKADDKETCFAEEGKKLVAASQAALGL

SEQ ID NO: 158 - protein, 585 aa, Artificial Sequence
  HSA K500A
DAHKSEVAHRFKDLGEENFKALVLIAFAQYLQQCPFEDHVKLVNEVTEFAKTCVADESAENCDKSLHTLFGDKLCTVATLRETYGEMADCCAKQEPERNECFLQHKDDNPNLPRLVRPEVDVMCTAFHDNEETFLKKYLYEIARRHPYFYAPELLFFAKRYKAAFTECCQAADKAACLLPKLDELRDEGKASSAKQRLKCASLQKFGERAFKAWAVARLSQRFPKAEFAEVSKLVTDLTKVHTECCHGDLLECADDRADLAKYICENQDSISSKLKECCEKPLLEKSHCIAEVENDEMPADLPSLAADFVESKDVCKNYAEAKDVFLGMFLYEYARRHPDYSVVLLLRLAKTYETTLEKCCAAADPHECYAKVFDEFKPLVEEPQNLIKQNCELFEQLGEYKFQNALLVRYTKKVPQVSTPTLVEVSRNLGKVGSKCCKHPEAKRMPCAEDYLSVVLNQLCVLHEKTPVSDRVTKCCTESLVNRRPCFSALEVDETYVPAEFNAETFTFHADICTLSEKERQIKKQTALVELVKHKPKATKEQLKAVMDDFAAFVEKCCKADDKETCFAEEGKKLVAASQAALGL

SEQ ID NO: 159 - protein, 585 aa, Artificial Sequence
  HSA E501A
DAHKSEVAHRFKDLGEENFKALVLIAFAQYLQQCPFEDHVKLVNEVTEFAKTCVADESAENCDKSLHTLFGDKLCTVATLRETYGEMADCCAKQEPERNECFLQHKDDNPNLPRLVRPEVDVMCTAFHDNEETFLKKYLYEIARRHPYFYAPELLFFAKRYKAAFTECCQAADKAACLLPKLDELRDEGKASSAKQRLKCASLQKFGERAFKAWAVARLSQRFPKAEFAEVSKLVTDLTKVHTECCHGDLLECADDRADLAKYICENQDSISSKLKECCEKPLLEKSHCIAEVENDEMPADLPSLAADFVESKDVCKNYAEAKDVFLGMFLYEYARRHPDYSVVLLLRLAKTYETTLEKCCAAADPHECYAKVFDEFKPLVEEPQNLIKQNCELFEQLGEYKFQNALLVRYTKKVPQVSTPTLVEVSRNLGKVGSKCCKHPEAKRMPCAEDYLSVVLNQLCVLHEKTPVSDRVTKCCTESLVNRRPCFSALEVDETYVPKAFNAETFTFHADICTLSEKERQIKKQTALVELVKHKPKATKEQLKAVMDDFAAFVEKCCKADDKETCFAEEGKKLVAASQAALGL

SEQ ID NO: 160 - protein, 585 aa, Artificial Sequence
  HSA H510Q
DAHKSEVAHRFKDLGEENFKALVLIAFAQYLQQCPFEDHVKLVNEVTEFAKTCVADESAENCDKSLHTLFGDKLCTVATLRETYGEMADCCAKQEPERNECFLQHKDDNPNLPRLVRPEVDVMCTAFHDNEETFLKKYLYEIARRHPYFYAPELLFFAKRYKAAFTECCQAADKAACLLPKLDELRDEGKASSAKQRLKCASLQKFGERAFKAWAVARLSQRFPKAEFAEVSKLVTDLTKVHTECCHGDLLECADDRADLAKYICENQDSISSKLKECCEKPLLEKSHCIAEVENDEMPADLPSLAADFVESKDVCKNYAEAKDVFLGMFLYEYARRHPDYSVVLLLRLAKTYETTLEKCCAAADPHECYAKVFDEFKPLVEEPQNLIKQNCELFEQLGEYKFQNALLVRYTKKVPQVSTPTLVEVSRNLGKVGSKCCKHPEAKRMPCAEDYLSVVLNQLCVLHEKTPVSDRVTKCCTESLVNRRPCFSALEVDETYVPKEFNAETFTFQADICTLSEKERQIKKQTALVELVKHKPKATKEQLKAVMDDFAAFVEKCCKADDKETCFAEEGKKLVAASQAALGL

SEQ ID NO: 161 - protein, 585 aa, Artificial Sequence
  HSA H535Q
DAHKSEVAHRFKDLGEENFKALVLIAFAQYLQQCPFEDHVKLVNEVTEFAKTCVADESAENCDKSLHTLFGDKLCTVATLRETYGEMADCCAKQEPERNECFLQHKDDNPNLPRLVRPEVDVMCTAFHDNEETFLKKYLYEIARRHPYFYAPELLFFAKRYKAAFTECCQAADKAACLLPKLDELRDEGKASSAKQRLKCASLQKFGERAFKAWAVARLSQRFPKAEFAEVSKLVTDLTKVHTECCHGDLLECADDRADLAKYICENQDSISSKLKECCEKPLLEKSHCIAEVENDEMPADLPSLAADFVESKDVCKNYAEAKDVFLGMFLYEYARRHPDYSVVLLLRLAKTYETTLEKCCAAADPHECYAKVFDEFKPLVEEPQNLIKQNCELFEQLGEYKFQNALLVRYTKKVPQVSTPTLVEVSRNLGKVGSKCCKHPEAKRMPCAEDYLSVVLNQLCVLHEKTPVSDRVTKCCTESLVNRRPCFSALEVDETYVPKEFNAETFTFHADICTLSEKERQIKKQTALVELVKQKPKATKEQLKAVMDDFAAFVEKCCKADDKETCFAEEGKKLVAASQAALGL

SEQ ID NO: 162 - protein, 585 aa, Artificial Sequence
  HSA K536A
DAHKSEVAHRFKDLGEENFKALVLIAFAQYLQQCPFEDHVKLVNEVTEFAKTCVADESAENCDKSLHTLFGDKLCTVATLRETYGEMADCCAKQEPERNECFLQHKDDNPNLPRLVRPEVDVMCTAFHDNEETFLKKYLYEIARRHPYFYAPELLFFAKRYKAAFTECCQAADKAACLLPKLDELRDEGKASSAKQRLKCASLQKFGERAFKAWAVARLSQRFPKAEFAEVSKLVTDLTKVHTECCHGDLLECADDRADLAKYICENQDSISSKLKECCEKPLLEKSHCIAEVENDEMPADLPSLAADFVESKDVCKNYAEAKDVFLGMFLYEYARRHPDYSVVLLLRLAKTYETTLEKCCAAADPHECYAKVFDEFKPLVEEPQNLIKQNCELFEQLGEYKFQNALLVRYTKKVPQVSTPTLVEVSRNLGKVGSKCCKHPEAKRMPCAEDYLSVVLNQLCVLHEKTPVSDRVTKCCTESLVNRRPCFSALEVDETYVPKEFNAETFTFHADICTLSEKERQIKKQTALVELVKHAPKATKEQLKAVMDDFAAFVEKCCKADDKETCFAEEGKKLVAASQAALGL

SEQ ID NO: 163 - protein, 585 aa, Artificial Sequence
  HSA P537A
DAHKSEVAHRFKDLGEENFKALVLIAFAQYLQQCPFEDHVKLVNEVTEFAKTCVADESAENCDKSLHTLFGDKLCTVATLRETYGEMADCCAKQEPERNECFLQHKDDNPNLPRLVRPEVDVMCTAFHDNEETFLKKYLYEIARRHPYFYAPELLFFAKRYKAAFTECCQAADKAACLLPKLDELRDEGKASSAKQRLKCASLQKFGERAFKAWAVARLSQRFPKAEFAEVSKLVTDLTKVHTECCHGDLLECADDRADLAKYICENQDSISSKLKECCEKPLLEKSHCIAEVENDEMPADLPSLAADFVESKDVCKNYAEAKDVFLGMFLYEYARRHPDYSVVLLLRLAKTYETTLEKCCAAADPHECYAKVFDEFKPLVEEPQNLIKQNCELFEQLGEYKFQNALLVRYTKKVPQVSTPTLVEVSRNLGKVGSKCCKHPEAKRMPCAEDYLSVVLNQLCVLHEKTPVSDRVTKCCTESLVNRRPCFSALEVDETYVPKEFNAETFTFHADICTLSEKERQIKKQTALVELVKHKAKATKEQLKAVMDDFAAFVEKCCKADDKETCFAEEGKKLVAASQAALGL

SEQ ID NO: 164 - protein, 585 aa, Artificial Sequence
  HSA K538A
DAHKSEVAHRFKDLGEENFKALVLIAFAQYLQQCPFEDHVKLVNEVTEFAKTCVADESAENCDKSLHTLFGDKLCTVATLRETYGEMADCCAKQEPERNECFLQHKDDNPNLPRLVRPEVDVMCTAFHDNEETFLKKYLYEIARRHPYFYAPELLFFAKRYKAAFTECCQAADKAACLLPKLDELRDEGKASSAKQRLKCASLQKFGERAFKAWAVARLSQRFPKAEFAEVSKLVTDLTKVHTECCHGDLLECADDRADLAKYICENQDSISSKLKECCEKPLLEKSHCIAEVENDEMPADLPSLAADFVESKDVCKNYAEAKDVFLGMFLYEYARRHPDYSVVLLLRLAKTYETTLEKCCAAADPHECYAKVFDEFKPLVEEPQNLIKQNCELFEQLGEYKFQNALLVRYTKKVPQVSTPTLVEVSRNLGKVGSKCCKHPEAKRMPCAEDYLSVVLNQLCVLHEKTPVSDRVTKCCTESLVNRRPCFSALEVDETYVPKEFNAETFTFHADICTLSEKERQIKKQTALVELVKHKPAATKEQLKAVMDDFAAFVEKCCKADDKETCFAEEGKKLVAASQAALGL

SEQ ID NO: 165 - protein, 505 aa, Artificial Sequence
  HSA DIIIa
DAHKSEVAHRFKDLGEENFKALVLIAFAQYLQQCPFEDHVKLVNEVTEFAKTCVADESAENCDKSLHTLFGDKLCTVATLRETYGEMADCCAKQEPERNECFLQHKDDNPNLPRLVRPEVDVMCTAFHDNEETFLKKYLYEIARRHPYFYAPELLFFAKRYKAAFTECCQAADKAACLLPKLDELRDEGKASSAKQRLKCASLQKFGERAFKAWAVARLSQRFPKAEFAEVSKLVTDLTKVHTECCHGDLLECADDRADLAKYICENQDSISSKLKECCEKPLLEKSHCIAEVENDEMPADLPSLAADFVESKDVCKNYAEAKDVFLGMFLYEYARRHPDYSVVLLLRLAKTYETTLEKCCAAADPHECYAKVFDEFKPLVEEPQNLIKQNCELFEQLGEYKFQNALLVRYTKKVPQVSTPTLVEVSRNLGKVGSKCCKHPEAKRMPCAEDYLSVVLNQLCVLHEKTPVSDRVTKCCTESLVNRRPCFSALEVDETYVPKEFNAE

SEQ ID NO: 166 - protein, 585 aa, Artificial Sequence
  HSA E531H
DAHKSEVAHRFKDLGEENFKALVLIAFAQYLQQCPFEDHVKLVNEVTEFAKTCVADESAENCDKSLHTLFGDKLCTVATLRETYGEMADCCAKQEPERNECFLQHKDDNPNLPRLVRPEVDVMCTAFHDNEETFLKKYLYEIARRHPYFYAPELLFFAKRYKAAFTECCQAADKAACLLPKLDELRDEGKASSAKQRLKCASLQKFGERAFKAWAVARLSQRFPKAEFAEVSKLVTDLTKVHTECCHGDLLECADDRADLAKYICENQDSISSKLKECCEKPLLEKSHCIAEVENDEMPADLPSLAADFVESKDVCKNYAEAKDVFLGMFLYEYARRHPDYSVVLLLRLAKTYETTLEKCCAAADPHECYAKVFDEFKPLVEEPQNLIKQNCELFEQLGEYKFQNALLVRYTKKVPQVSTPTLVEVSRNLGKVGSKCCKHPEAKRMPCAEDYLSVVLNQLCVLHEKTPVSDRVTKCCTESLVNRRPCFSALEVDETYVPKEFNAETFTFHADICTLSEKERQIKKQTALVHLVKHKPKATKEQLKAVMDDFAAFVEKCCKADDKETCFAEEGKKLVAASQAALGL

SEQ ID NO: 167 - protein, 585 aa, Artificial Sequence
  HSA E531A
DAHKSEVAHRFKDLGEENFKALVLIAFAQYLQQCPFEDHVKLVNEVTEFAKTCVADESAENCDKSLHTLFGDKLCTVATLRETYGEMADCCAKQEPERNECFLQHKDDNPNLPRLVRPEVDVMCTAFHDNEETFLKKYLYEIARRHPYFYAPELLFFAKRYKAAFTECCQAADKAACLLPKLDELRDEGKASSAKQRLKCASLQKFGERAFKAWAVARLSQRFPKAEFAEVSKLVTDLTKVHTECCHGDLLECADDRADLAKYICENQDSISSKLKECCEKPLLEKSHCIAEVENDEMPADLPSLAADFVESKDVCKNYAEAKDVFLGMFLYEYARRHPDYSVVLLLRLAKTYETTLEKCCAAADPHECYAKVFDEFKPLVEEPQNLIKQNCELFEQLGEYKFQNALLVRYTKKVPQVSTPTLVEVSRNLGKVGSKCCKHPEAKRMPCAEDYLSVVLNQLCVLHEKTPVSDRVTKCCTESLVNRRPCFSALEVDETYVPKEFNAETFTFHADICTLSEKERQIKKQTALVALVKHKPKATKEQLKAVMDDFAAFVEKCCKADDKETCFAEEGKKLVAASQAALGL

SEQ ID NO: 168 - protein, 585 aa, Artificial Sequence
  HSA D108A
DAHKSEVAHRFKDLGEENFKALVLIAFAQYLQQCPFEDHVKLVNEVTEFAKTCVADESAENCDKSLHTLFGDKLCTVATLRETYGEMADCCAKQEPERNECFLQHKDANPNLPRLVRPEVDVMCTAFHDNEETFLKKYLYEIARRHPYFYAPELLFFAKRYKAAFTECCQAADKAACLLPKLDELRDEGKASSAKQRLKCASLQKFGERAFKAWAVARLSQRFPKAEFAEVSKLVTDLTKVHTECCHGDLLECADDRADLAKYICENQDSISSKLKECCEKPLLEKSHCIAEVENDEMPADLPSLAADFVESKDVCKNYAEAKDVFLGMFLYEYARRHPDYSVVLLLRLAKTYETTLEKCCAAADPHECYAKVFDEFKPLVEEPQNLIKQNCELFEQLGEYKFQNALLVRYTKKVPQVSTPTLVEVSRNLGKVGSKCCKHPEAKRMPCAEDYLSVVLNQLCVLHEKTPVSDRVTKCCTESLVNRRPCFSALEVDETYVPKEFNAETFTFHADICTLSEKERQIKKQTALVELVKHKPKATKEQLKAVMDDFAAFVEKCCKADDKETCFAEEGKKLVAASQAALGL

SEQ ID NO: 169 - protein, 585 aa, Artificial Sequence
  HSA N111K
DAHKSEVAHRFKDLGEENFKALVLIAFAQYLQQCPFEDHVKLVNEVTEFAKTCVADESAENCDKSLHTLFGDKLCTVATLRETYGEMADCCAKQEPERNECFLQHKDDNPKLPRLVRPEVDVMCTAFHDNEETFLKKYLYEIARRHPYFYAPELLFFAKRYKAAFTECCQAADKAACLLPKLDELRDEGKASSAKQRLKCASLQKFGERAFKAWAVARLSQRFPKAEFAEVSKLVTDLTKVHTECCHGDLLECADDRADLAKYICENQDSISSKLKECCEKPLLEKSHCIAEVENDEMPADLPSLAADFVESKDVCKNYAEAKDVFLGMFLYEYARRHPDYSVVLLLRLAKTYETTLEKCCAAADPHECYAKVFDEFKPLVEEPQNLIKQNCELFEQLGEYKFQNALLVRYTKKVPQVSTPTLVEVSRNLGKVGSKCCKHPEAKRMPCAEDYLSVVLNQLCVLHEKTPVSDRVTKCCTESLVNRRPCFSALEVDETYVPKEFNAETFTFHADICTLSEKERQIKKQTALVELVKHKPKATKEQLKAVMDDFAAFVEKCCKADDKETCFAEEGKKLVAASQAALGL

SEQ ID NO: 170 - protein, 585 aa, Artificial Sequence
  HSA N111D
DAHKSEVAHRFKDLGEENFKALVLIAFAQYLQQCPFEDHVKLVNEVTEFAKTCVADESAENCDKSLHTLFGDKLCTVATLRETYGEMADCCAKQEPERNECFLQHKDDNPDLPRLVRPEVDVMCTAFHDNEETFLKKYLYEIARRHPYFYAPELLFFAKRYKAAFTECCQAADKAACLLPKLDELRDEGKASSAKQRLKCASLQKFGERAFKAWAVARLSQRFPKAEFAEVSKLVTDLTKVHTECCHGDLLECADDRADLAKYICENQDSISSKLKECCEKPLLEKSHCIAEVENDEMPADLPSLAADFVESKDVCKNYAEAKDVFLGMFLYEYARRHPDYSVVLLLRLAKTYETTLEKCCAAADPHECYAKVFDEFKPLVEEPQNLIKQNCELFEQLGEYKFQNALLVRYTKKVPQVSTPTLVEVSRNLGKVGSKCCKHPEAKRMPCAEDYLSVVLNQLCVLHEKTPVSDRVTKCCTESLVNRRPCFSALEVDETYVPKEFNAETFTFHADICTLSEKERQIKKQTALVELVKHKPKATKEQLKAVMDDFAAFVEKCCKADDKETCFAEEGKKLVAASQAALGL

SEQ ID NO: 171 - protein, 585 aa, Artificial Sequence
  HSA N111G
DAHKSEVAHRFKDLGEENFKALVLIAFAQYLQQCPFEDHVKLVNEVTEFAKTCVADESAENCDKSLHTLFGDKLCTVATLRETYGEMADCCAKQEPERNECFLQHKDDNPGLPRLVRPEVDVMCTAFHDNEETFLKKYLYEIARRHPYFYAPELLFFAKRYKAAFTECCQAADKAACLLPKLDELRDEGKASSAKQRLKCASLQKFGERAFKAWAVARLSQRFPKAEFAEVSKLVTDLTKVHTECCHGDLLECADDRADLAKYICENQDSISSKLKECCEKPLLEKSHCIAEVENDEMPADLPSLAADFVESKDVCKNYAEAKDVFLGMFLYEYARRHPDYSVVLLLRLAKTYETTLEKCCAAADPHECYAKVFDEFKPLVEEPQNLIKQNCELFEQLGEYKFQNALLVRYTKKVPQVSTPTLVEVSRNLGKVGSKCCKHPEAKRMPCAEDYLSVVLNQLCVLHEKTPVSDRVTKCCTESLVNRRPCFSALEVDETYVPKEFNAETFTFHADICTLSEKERQIKKQTALVELVKHKPKATKEQLKAVMDDFAAFVEKCCKADDKETCFAEEGKKLVAASQAALGL

SEQ ID NO: 172 - protein, 585 aa, Artificial Sequence
  HSA N111H
DAHKSEVAHRFKDLGEENFKALVLIAFAQYLQQCPFEDHVKLVNEVTEFAKTCVADESAENCDKSLHTLFGDKLCTVATLRETYGEMADCCAKQEPERNECFLQHKDDNPHLPRLVRPEVDVMCTAFHDNEETFLKKYLYEIARRHPYFYAPELLFFAKRYKAAFTECCQAADKAACLLPKLDELRDEGKASSAKQRLKCASLQKFGERAFKAWAVARLSQRFPKAEFAEVSKLVTDLTKVHTECCHGDLLECADDRADLAKYICENQDSISSKLKECCEKPLLEKSHCIAEVENDEMPADLPSLAADFVESKDVCKNYAEAKDVFLGMFLYEYARRHPDYSVVLLLRLAKTYETTLEKCCAAADPHECYAKVFDEFKPLVEEPQNLIKQNCELFEQLGEYKFQNALLVRYTKKVPQVSTPTLVEVSRNLGKVGSKCCKHPEAKRMPCAEDYLSVVLNQLCVLHEKTPVSDRVTKCCTESLVNRRPCFSALEVDETYVPKEFNAETFTFHADICTLSEKERQIKKQTALVELVKHKPKATKEQLKAVMDDFAAFVEKCCKADDKETCFAEEGKKLVAASQAALGL

SEQ ID NO: 173 - protein, 585 aa, Artificial Sequence
  HSA K276N
DAHKSEVAHRFKDLGEENFKALVLIAFAQYLQQCPFEDHVKLVNEVTEFAKTCVADESAENCDKSLHTLFGDKLCTVATLRETYGEMADCCAKQEPERNECFLQHKDDNPNLPRLVRPEVDVMCTAFHDNEETFLKKYLYEIARRHPYFYAPELLFFAKRYKAAFTECCQAADKAACLLPKLDELRDEGKASSAKQRLKCASLQKFGERAFKAWAVARLSQRFPKAEFAEVSKLVTDLTKVHTECCHGDLLECADDRADLAKYICENQDSISSKLNECCEKPLLEKSHCIAEVENDEMPADLPSLAADFVESKDVCKNYAEAKDVFLGMFLYEYARRHPDYSVVLLLRLAKTYETTLEKCCAAADPHECYAKVFDEFKPLVEEPQNLIKQNCELFEQLGEYKFQNALLVRYTKKVPQVSTPTLVEVSRNLGKVGSKCCKHPEAKRMPCAEDYLSVVLNQLCVLHEKTPVSDRVTKCCTESLVNRRPCFSALEVDETYVPKEFNAETFTFHADICTLSEKERQIKKQTALVELVKHKPKATKEQLKAVMDDFAAFVEKCCKADDKETCFAEEGKKLVAASQAALGL

SEQ ID NO: 174 - protein, 585 aa, Artificial Sequence
  HSA N111R
DAHKSEVAHRFKDLGEENFKALVLIAFAQYLQQCPFEDHVKLVNEVTEFAKTCVADESAENCDKSLHTLFGDKLCTVATLRETYGEMADCCAKQEPERNECFLQHKDDNPRLPRLVRPEVDVMCTAFHDNEETFLKKYLYEIARRHPYFYAPELLFFAKRYKAAFTECCQAADKAACLLPKLDELRDEGKASSAKQRLKCASLQKFGERAFKAWAVARLSQRFPKAEFAEVSKLVTDLTKVHTECCHGDLLECADDRADLAKYICENQDSISSKLKECCEKPLLEKSHCIAEVENDEMPADLPSLAADFVESKDVCKNYAEAKDVFLGMFLYEYARRHPDYSVVLLLRLAKTYETTLEKCCAAADPHECYAKVFDEFKPLVEEPQNLIKQNCELFEQLGEYKFQNALLVRYTKKVPQVSTPTLVEVSRNLGKVGSKCCKHPEAKRMPCAEDYLSVVLNQLCVLHEKTPVSDRVTKCCTESLVNRRPCFSALEVDETYVPKEFNAETFTFHADICTLSEKERQIKKQTALVELVKHKPKATKEQLKAVMDDFAAFVEKCCKADDKETCFAEEGKKLVAASQAALGL

SEQ ID NO: 175 - protein, 585 aa, Artificial Sequence
  HSA N111Q
DAHKSEVAHRFKDLGEENFKALVLIAFAQYLQQCPFEDHVKLVNEVTEFAKTCVADESAENCDKSLHTLFGDKLCTVATLRETYGEMADCCAKQEPERNECFLQHKDDNPQLPRLVRPEVDVMCTAFHDNEETFLKKYLYEIARRHPYFYAPELLFFAKRYKAAFTECCQAADKAACLLPKLDELRDEGKASSAKQRLKCASLQKFGERAFKAWAVARLSQRFPKAEFAEVSKLVTDLTKVHTECCHGDLLECADDRADLAKYICENQDSISSKLKECCEKPLLEKSHCIAEVENDEMPADLPSLAADFVESKDVCKNYAEAKDVFLGMFLYEYARRHPDYSVVLLLRLAKTYETTLEKCCAAADPHECYAKVFDEFKPLVEEPQNLIKQNCELFEQLGEYKFQNALLVRYTKKVPQVSTPTLVEVSRNLGKVGSKCCKHPEAKRMPCAEDYLSVVLNQLCVLHEKTPVSDRVTKCCTESLVNRRPCFSALEVDETYVPKEFNAETFTFHADICTLSEKERQIKKQTALVELVKHKPKATKEQLKAVMDDFAAFVEKCCKADDKETCFAEEGKKLVAASQAALGL

SEQ ID NO: 176 - protein, 585 aa, Artificial Sequence
  HSA N111E
DAHKSEVAHRFKDLGEENFKALVLIAFAQYLQQCPFEDHVKLVNEVTEFAKTCVADESAENCDKSLHTLFGDKLCTVATLRETYGEMADCCAKQEPERNECFLQHKDDNPELPRLVRPEVDVMCTAFHDNEETFLKKYLYEIARRHPYFYAPELLFFAKRYKAAFTECCQAADKAACLLPKLDELRDEGKASSAKQRLKCASLQKFGERAFKAWAVARLSQRFPKAEFAEVSKLVTDLTKVHTECCHGDLLECADDRADLAKYICENQDSISSKLKECCEKPLLEKSHCIAEVENDEMPADLPSLAADFVESKDVCKNYAEAKDVFLGMFLYEYARRHPDYSVVLLLRLAKTYETTLEKCCAAADPHECYAKVFDEFKPLVEEPQNLIKQNCELFEQLGEYKFQNALLVRYTKKVPQVSTPTLVEVSRNLGKVGSKCCKHPEAKRMPCAEDYLSVVLNQLCVLHEKTPVSDRVTKCCTESLVNRRPCFSALEVDETYVPKEFNAETFTFHADICTLSEKERQIKKQTALVELVKHKPKATKEQLKAVMDDFAAFVEKCCKADDKETCFAEEGKKLVAASQAALGL

SEQ ID NO: 177 - protein, 585 aa, Artificial Sequence
  HSA N109D
DAHKSEVAHRFKDLGEENFKALVLIAFAQYLQQCPFEDHVKLVNEVTEFAKTCVADESAENCDKSLHTLFGDKLCTVATLRETYGEMADCCAKQEPERNECFLQHKDDDPNLPRLVRPEVDVMCTAFHDNEETFLKKYLYEIARRHPYFYAPELLFFAKRYKAAFTECCQAADKAACLLPKLDELRDEGKASSAKQRLKCASLQKFGERAFKAWAVARLSQRFPKAEFAEVSKLVTDLTKVHTECCHGDLLECADDRADLAKYICENQDSISSKLKECCEKPLLEKSHCIAEVENDEMPADLPSLAADFVESKDVCKNYAEAKDVFLGMFLYEYARRHPDYSVVLLLRLAKTYETTLEKCCAAADPHECYAKVFDEFKPLVEEPQNLIKQNCELFEQLGEYKFQNALLVRYTKKVPQVSTPTLVEVSRNLGKVGSKCCKHPEAKRMPCAEDYLSVVLNQLCVLHEKTPVSDRVTKCCTESLVNRRPCFSALEVDETYVPKEFNAETFTFHADICTLSEKERQIKKQTALVELVKHKPKATKEQLKAVMDDFAAFVEKCCKADDKETCFAEEGKKLVAASQAALGL

SEQ ID NO: 178 - protein, 585 aa, Artificial Sequence
  HSA N109E
DAHKSEVAHRFKDLGEENFKALVLIAFAQYLQQCPFEDHVKLVNEVTEFAKTCVADESAENCDKSLHTLFGDKLCTVATLRETYGEMADCCAKQEPERNECFLQHKDDEPNLPRLVRPEVDVMCTAFHDNEETFLKKYLYEIARRHPYFYAPELLFFAKRYKAAFTECCQAADKAACLLPKLDELRDEGKASSAKQRLKCASLQKFGERAFKAWAVARLSQRFPKAEFAEVSKLVTDLTKVHTECCHGDLLECADDRADLAKYICENQDSISSKLKECCEKPLLEKSHCIAEVENDEMPADLPSLAADFVESKDVCKNYAEAKDVFLGMFLYEYARRHPDYSVVLLLRLAKTYETTLEKCCAAADPHECYAKVFDEFKPLVEEPQNLIKQNCELFEQLGEYKFQNALLVRYTKKVPQVSTPTLVEVSRNLGKVGSKCCKHPEAKRMPCAEDYLSVVLNQLCVLHEKTPVSDRVTKCCTESLVNRRPCFSALEVDETYVPKEFNAETFTFHADICTLSEKERQIKKQTALVELVKHKPKATKEQLKAVMDDFAAFVEKCCKADDKETCFAEEGKKLVAASQAALGL

SEQ ID NO: 179 - protein, 585 aa, Artificial Sequence
  HSA N109Q
DAHKSEVAHRFKDLGEENFKALVLIAFAQYLQQCPFEDHVKLVNEVTEFAKTCVADESAENCDKSLHTLFGDKLCTVATLRETYGEMADCCAKQEPERNECFLQHKDDQPNLPRLVRPEVDVMCTAFHDNEETFLKKYLYEIARRHPYFYAPELLFFAKRYKAAFTECCQAADKAACLLPKLDELRDEGKASSAKQRLKCASLQKFGERAFKAWAVARLSQRFPKAEFAEVSKLVTDLTKVHTECCHGDLLECADDRADLAKYICENQDSISSKLKECCEKPLLEKSHCIAEVENDEMPADLPSLAADFVESKDVCKNYAEAKDVFLGMFLYEYARRHPDYSVVLLLRLAKTYETTLEKCCAAADPHECYAKVFDEFKPLVEEPQNLIKQNCELFEQLGEYKFQNALLVRYTKKVPQVSTPTLVEVSRNLGKVGSKCCKHPEAKRMPCAEDYLSVVLNQLCVLHEKTPVSDRVTKCCTESLVNRRPCFSALEVDETYVPKEFNAETFTFHADICTLSEKERQIKKQTALVELVKHKPKATKEQLKAVMDDFAAFVEKCCKADDKETCFAEEGKKLVAASQAALGL

SEQ ID NO: 180 - protein, 585 aa, Artificial Sequence
  HSA N109R
DAHKSEVAHRFKDLGEENFKALVLIAFAQYLQQCPFEDHVKLVNEVTEFAKTCVADESAENCDKSLHTLFGDKLCTVATLRETYGEMADCCAKQEPERNECFLQHKDDRPNLPRLVRPEVDVMCTAFHDNEETFLKKYLYEIARRHPYFYAPELLFFAKRYKAAFTECCQAADKAACLLPKLDELRDEGKASSAKQRLKCASLQKFGERAFKAWAVARLSQRFPKAEFAEVSKLVTDLTKVHTECCHGDLLECADDRADLAKYICENQDSISSKLKECCEKPLLEKSHCIAEVENDEMPADLPSLAADFVESKDVCKNYAEAKDVFLGMFLYEYARRHPDYSVVLLLRLAKTYETTLEKCCAAADPHECYAKVFDEFKPLVEEPQNLIKQNCELFEQLGEYKFQNALLVRYTKKVPQVSTPTLVEVSRNLGKVGSKCCKHPEAKRMPCAEDYLSVVLNQLCVLHEKTPVSDRVTKCCTESLVNRRPCFSALEVDETYVPKEFNAETFTFHADICTLSEKERQIKKQTALVELVKHKPKATKEQLKAVMDDFAAFVEKCCKADDKETCFAEEGKKLVAASQAALGL

SEQ ID NO: 181 - protein, 585 aa, Artificial Sequence
  HSA N109K
DAHKSEVAHRFKDLGEENFKALVLIAFAQYLQQCPFEDHVKLVNEVTEFAKTCVADESAENCDKSLHTLFGDKLCTVATLRETYGEMADCCAKQEPERNECFLQHKDDKPNLPRLVRPEVDVMCTAFHDNEETFLKKYLYEIARRHPYFYAPELLFFAKRYKAAFTECCQAADKAACLLPKLDELRDEGKASSAKQRLKCASLQKFGERAFKAWAVARLSQRFPKAEFAEVSKLVTDLTKVHTECCHGDLLECADDRADLAKYICENQDSISSKLKECCEKPLLEKSHCIAEVENDEMPADLPSLAADFVESKDVCKNYAEAKDVFLGMFLYEYARRHPDYSVVLLLRLAKTYETTLEKCCAAADPHECYAKVFDEFKPLVEEPQNLIKQNCELFEQLGEYKFQNALLVRYTKKVPQVSTPTLVEVSRNLGKVGSKCCKHPEAKRMPCAEDYLSVVLNQLCVLHEKTPVSDRVTKCCTESLVNRRPCFSALEVDETYVPKEFNAETFTFHADICTLSEKERQIKKQTALVELVKHKPKATKEQLKAVMDDFAAFVEKCCKADDKETCFAEEGKKLVAASQAALGL

SEQ ID NO: 182 - protein, 585 aa, Artificial Sequence
  HSA N109H
DAHKSEVAHRFKDLGEENFKALVLIAFAQYLQQCPFEDHVKLVNEVTEFAKTCVADESAENCDKSLHTLFGDKLCTVATLRETYGEMADCCAKQEPERNECFLQHKDDHPNLPRLVRPEVDVMCTAFHDNEETFLKKYLYEIARRHPYFYAPELLFFAKRYKAAFTECCQAADKAACLLPKLDELRDEGKASSAKQRLKCASLQKFGERAFKAWAVARLSQRFPKAEFAEVSKLVTDLTKVHTECCHGDLLECADDRADLAKYICENQDSISSKLKECCEKPLLEKSHCIAEVENDEMPADLPSLAADFVESKDVCKNYAEAKDVFLGMFLYEYARRHPDYSVVLLLRLAKTYETTLEKCCAAADPHECYAKVFDEFKPLVEEPQNLIKQNCELFEQLGEYKFQNALLVRYTKKVPQVSTPTLVEVSRNLGKVGSKCCKHPEAKRMPCAEDYLSVVLNQLCVLHEKTPVSDRVTKCCTESLVNRRPCFSALEVDETYVPKEFNAETFTFHADICTLSEKERQIKKQTALVELVKHKPKATKEQLKAVMDDFAAFVEKCCKADDKETCFAEEGKKLVAASQAALGL

SEQ ID NO: 183 - protein, 585 aa, Artificial Sequence
  HSA N109G
DAHKSEVAHRFKDLGEENFKALVLIAFAQYLQQCPFEDHVKLVNEVTEFAKTCVADESAENCDKSLHTLFGDKLCTVATLRETYGEMADCCAKQEPERNECFLQHKDDGPNLPRLVRPEVDVMCTAFHDNEETFLKKYLYEIARRHPYFYAPELLFFAKRYKAAFTECCQAADKAACLLPKLDELRDEGKASSAKQRLKCASLQKFGERAFKAWAVARLSQRFPKAEFAEVSKLVTDLTKVHTECCHGDLLECADDRADLAKYICENQDSISSKLKECCEKPLLEKSHCIAEVENDEMPADLPSLAADFVESKDVCKNYAEAKDVFLGMFLYEYARRHPDYSVVLLLRLAKTYETTLEKCCAAADPHECYAKVFDEFKPLVEEPQNLIKQNCELFEQLGEYKFQNALLVRYTKKVPQVSTPTLVEVSRNLGKVGSKCCKHPEAKRMPCAEDYLSVVLNQLCVLHEKTPVSDRVTKCCTESLVNRRPCFSALEVDETYVPKEFNAETFTFHADICTLSEKERQIKKQTALVELVKHKPKATKEQLKAVMDDFAAFVEKCCKADDKETCFAEEGKKLVAASQAALGL

SEQ ID NO: 184 - protein, 585 aa, Artificial Sequence
  HSA N108E
DAHKSEVAHRFKDLGEENFKALVLIAFAQYLQQCPFEDHVKLVNEVTEFAKTCVADESAENCDKSLHTLFGDKLCTVATLRETYGEMADCCAKQEPERNECFLQHKDENPNLPRLVRPEVDVMCTAFHDNEETFLKKYLYEIARRHPYFYAPELLFFAKRYKAAFTECCQAADKAACLLPKLDELRDEGKASSAKQRLKCASLQKFGERAFKAWAVARLSQRFPKAEFAEVSKLVTDLTKVHTECCHGDLLECADDRADLAKYICENQDSISSKLKECCEKPLLEKSHCIAEVENDEMPADLPSLAADFVESKDVCKNYAEAKDVFLGMFLYEYARRHPDYSVVLLLRLAKTYETTLEKCCAAADPHECYAKVFDEFKPLVEEPQNLIKQNCELFEQLGEYKFQNALLVRYTKKVPQVSTPTLVEVSRNLGKVGSKCCKHPEAKRMPCAEDYLSVVLNQLCVLHEKTPVSDRVTKCCTESLVNRRPCFSALEVDETYVPKEFNAETFTFHADICTLSEKERQIKKQTALVELVKHKPKATKEQLKAVMDDFAAFVEKCCKADDKETCFAEEGKKLVAASQAALGL
